(19) United States
(12) Patent Application Publication
(10) Pub. No.: US 2018/0305465 A1
(43) Pub. Date: Oct. 25, 2018

(54) HETERODIMERIC ANTIBODIES THAT BIND CD3 AND CD38

(71) Applicants: AMGEN INC., Thousand, CA (US); XENCOR, INC., Monrovia, CA (US)

(72) Inventors: Jennitte Leann Stevens, Thousand Oaks, CA (US); Mercedesz Balazs, Thousand Oaks, CA (US); Olivier Nolan-Stevaux, Millbrae, CA (US); Gregory Moore, Monrovia, CA (US); John Desjarlais, Monrovia, CA (US); Matthew J. Bernett, Monrovia, CA (US); Seung Y. Chu, Monrovia, CA (US); Rumana Rashid, Monrovia, CA (US); Umesh Muchhal, Monrovia, CA (US)

(21) Appl. No.: 15/779,325

(22) PCT Filed: Nov. 23, 2016
(86) PCT No.: PCT/US2016/063480

§ 371 Date: May 25, 2018

Related U.S. Application Data
(63) Continuation-in-part of application No. 14/952,786, filed on Nov. 25, 2015.

(30) Foreign Application Priority Data
Nov. 25, 2015 (US) PCT/US2015/062786

(51) Int. Cl. C07K 16/46; C07K 16/28; C07K 16/40; A61P 35/00

(52) U.S. Cl. CPC C07K 16/468; C07K 16/2809; C07K 16/40; A61P 35/00; A61K 2039/505; C07K 2317/622; C07K 2317/55; C07K 2317/73; C07K 2317/31

(57) ABSTRACT

The present invention is directed to heterodimeric antibodies that bind CD3 and CD38.

### CROSS-REFERENCE TO RELATED APPLICATIONS AND INCORPORATION BY REFERENCE

[0001] This application claims priority to International Patent Application No. PCT/US2015/062786, filed on Nov. 25, 2015, and U.S. patent application Ser. No. 14/952,786, filed on Nov. 25, 2015, which are expressly incorporated herein by reference in their entirety, with particular reference to the figures, legends and claims therein.

[0002] Incorporated by reference in its entirety is a computer-readable nucleotide/amino acid sequence listing submitted concurrently herewith and identified as follows: ASCII (text) file named “50636_SeqListing_.txt,” 707,494 bytes created Nov. 23, 2016.

### BACKGROUND OF THE INVENTION

[0003] Antibody-based therapeutics have been used successfully to treat a variety of diseases, including cancer and autoimmune/inflammatory disorders. Yet improvements to this class of drugs are still needed, particularly with respect to enhancing their clinical efficacy. One avenue being explored is the engineering of additional and novel antigen binding sites into antibody-based drugs such that a single immunoglobulin molecule co-engages two different antigens. Such non-native or alternate antibody formats that engage two different antigens are often referred to as bispecifics. Because the considerable diversity of the antibody variable region (Fv) makes it possible to produce an Fv that recognizes virtually any molecule, the typical approach to bispecific generation is the introduction of new variable regions into the antibody.

[0004] A number of alternate antibody formats have been explored for bispecific targeting (Chames & Baty, 2009, mAbs 1[6]:1-9; Holliger & Hudson, 2005, Nature Biotechnology 23[9]:1126-1136; Kontermann, mAbs 4(2):182 (2012), all of which are expressly incorporated herein by reference). Initially, bispecific antibodies were made by fusing two cell lines that each produced a single monoclonal antibody (Milstein et al., 1983, Nature 305:537-540). Although the resulting hybrid hybridoma or quadroma did produce bispecific antibodies, they were only a minor population, and extensive purification was required to isolate the desired antibody. An engineering solution to this was the use of antibody fragments to make bispecifics. Because such fragments lack the complex quaternary structure of a full length antibody, variable light and heavy chains can be linked in single genetic constructs. Antibody fragments of many different forms have been generated, including diabodies, single chain diabodies, tandem scFv's, and Fab2 bispecifics (Chames & Baty, 2009, mAbs 1[6]:1-9; Holliger & Hudson, 2005, Nature Biotechnology 23[9]:1126-1136; expressly incorporated herein by reference). While these formats can be expressed at high levels in bacteria and may have favorable penetration benefits due to their small size, they clear rapidly in vivo and can present manufacturing obstacles related to their production and stability. A principal cause of these drawbacks is that antibody fragments typically lack the constant region of the antibody with its associated functional properties, including larger size, high stability, and binding to various Fc receptors and ligands that maintain long half-life in serum (i.e. the neonatal Fc receptor FcRn) or serve as binding sites for purification (i.e. protein A and protein G).

[0005] More recent work has attempted to address the shortcomings of fragment-based bispecifics by engineering dual binding into full length antibody-like formats (Wu et al., 2007, Nature Biotechnology 25[11]:1290-1297; U.S. Ser. No. 12/477,711; Michaelson et al., 2009, mAbs 1[2]:128-141; PCT/US2008/074693; Zuo et al., 2000, Protein Engineering 13[5]:361-367; U.S. Ser. No. 09/865,198; Shen et al., 2006, J Biol Chem 281[16]:10706-10714; Lu et al., 2005, J Biol Chem 280[20]:19665-19672; PCT/US2005/025472; expressly incorporated herein by reference). These formats overcome some of the obstacles of the antibody fragment bispecifics, principally because they contain an Fc region. One significant drawback of these formats is that, because they build new antigen binding sites on top of the homodimeric constant chains, binding to the new antigen is always bivalent.

[0006] For many antigens that are attractive as co-targets in a therapeutic bispecific format, the desired binding is monovalent rather than bivalent. For many immune receptors, cellular activation is accomplished by cross-linking of a monovalent binding interaction. The mechanism of cross-linking is typically mediated by antibody/antigen immune complexes, or via effector cell to target cell engagement. For example, the low affinity Fc gamma receptors (FcγRs) such as FcγRIIa, FcγRIIb, and FcγRIIIa bind monovalently to the antibody Fc region. Monovalent binding does not activate cells expressing these FcγRs; however, upon immune complexation or cell-to-cell contact, receptors are cross-linked and clustered on the cell surface, leading to activation. For receptors responsible for mediating cellular killing, for example FcγRIIIa on natural killer (NK) cells, receptor cross-linking and cellular activation occurs when the effector cell engages the target cell in a highly avid format (Bowles & Weiner, 2005, J Immunol Methods 304:88-99, expressly incorporated by reference). Similarly, on B cells the inhibitory receptor FcγRIIb downregulates B cell activation only when it engages into an immune complex with the cell surface B-cell receptor (BCR), a mechanism that is mediated by immune complexation of soluble IgG's with the same antigen that is recognized by the BCR (Heyman 2003, Immunol Lett 88[2]:157-161; Smith and Clatworthy, 2010, Nature Reviews Immunology 10:328-343; expressly incorporated by reference). As another example, CD3 activation of T-cells occurs only when its associated T-cell receptor (TCR) engages antigen-loaded MHC on antigen presenting cells in a highly avid cell-to-cell synapse (Kuhns et al., 2006, Immunity 24:133-139). Indeed nonspecific bivalent cross-linking of CD3 using an anti-CD3 antibody elicits a cytokine storm and toxicity (Penuche et al., 2009, J Immunol 183[2]:953-61; Chatenoud & Bluestone, 2007, Nature Reviews Immunology 7:622-632; expressly incorporated by reference). Thus for practical clinical use, the preferred mode of CD3 co-engagement for redirected killing of targets cells is monovalent binding that results in activation only upon engagement with the co-engaged target.

[0007] CD38, also known as cyclic ADP ribose hydrolase, is a type II transmembrane glycoprotein with a long C-terminal extracellular domain and a short N-terminal cytoplasmic domain. Among hematopoietic cells, an assortment of functional effects have been ascribed to CD38 mediated signaling, including lymphocyte proliferation, cytokine release, regulation of B and myeloid cell development and survival, and induction of dendritic cell maturation. CD38 is unregulated in many hematopoeitic malignancies and in cell lines derived from various hematopoietic malignancies including non-Hodgkin's lymphoma (NHL), Burkitt's lymphoma (BL), multiple myeloma (MM), B chronic lymphocytic leukemia (B-CLL), B and T acute lymphocytic leukemia (ALL), T cell lymphoma (TCL), acute myeloid leukemia (AML), hairy cell leukemia (HCL), Hodgkin's Lymphoma (HL), and chronic myeloid leukemia (CML). On the other hand, most primitive pluripotent stem cells of the hematopoietic system are CD38-. In spite of the recent progress in the discovery and development of anti-cancer agents, many forms of cancer involving CD38-expressing tumors still have a poor prognosis. Thus, there is a need for improved methods for treating such forms of cancer.

[0008] Thus while bispecifics generated from antibody fragments suffer biophysical and pharmacokinetic hurdles, a drawback of those built with full length antibody-like formats is that they engage co-target antigens multivalently in the absence of the primary target antigen, leading to nonspecific activation and potentially toxicity. The present invention solves this problem by introducing novel bispecific antibodies directed to CD3 and CD38.

### BRIEF SUMMARY OF THE INVENTION

[0009] Accordingly, the present invention provides heterodimeric antibodies directed against CD3 and CD38. In some embodiments, the heterodimeric antibodies comprise a first monomer comprising SEQ ID NO:91; a second monomer comprising SEQ ID NO:92; and a light chain comprising SEQ ID NO:93. In some embodiments, the heterodimeric antibodies comprise a first monomer comprising SEQ ID NO:88; a second monomer comprising SEQ ID NO:89; and a light chain comprising SEQ ID NO:90. The invention further provides nucleic acid compositions comprising first, second and third nucleic acids that encode the sequences above, as well as expression vectors comprising the nucleic acid compositions, host cells comprising either the nucleic acids or expression vectors, and methods of making and using the heterodimeric antibodies.

[0010] In an additional aspect, the invention provides heterodimeric antibodies comprising: a first monomer comprising: i) a first Fc domain; ii) an anti-CD3 scFv comprising a scFv variable light domain, an scFv linker and a scFv variable heavy domain; wherein said scFv is covalently attached to the N-terminus of said Fc domain using a domain linker; a second monomer comprising a heavy chain comprising: i) a heavy variable domain; and ii) a heavy chain constant domain comprising a second Fc domain; and a light chain comprising a variable light domain and a variable light constant domain. In some aspects the scFv variable light domain comprises: a vlCDR1 having SEQ ID NO:15, a vlCDR2 having SEQ ID NO:16 and a vlCDR3 having SEQ ID NO:17, said scFv variable heavy domain comprises a vhCDR1 having SEQ ID NO:11, a vhCDR2 having SEQ ID NO:12 and a vhCDR3 having SEQ ID NO:13, and wherein said heavy variable domain and said variable light domain bind CD38.

[0011] In a further aspect, the invention provides heterodimeric antibodies comprising: a) a first monomer comprising: i) a first Fc domain; ii) an anti-CD3 scFv comprising a scFv variable light domain, an scFv linker and a scFv variable heavy domain; wherein said scFv is covalently attached to the N-terminus of said Fc domain using a domain linker; b) a second monomer comprising a heavy chain comprising: i) a heavy variable domain; and ii) a heavy chain constant domain comprising a second Fc domain; and c) a light chain comprising a variable light domain and a variable light constant domain. In this aspect, the scFv variable light domain comprises: a vlCDR1 having SEQ ID NO:24, a vlCDR2 having SEQ ID NO:25 and a vlCDR3 having SEQ ID NO:26, said scFv variable heavy domain comprises a vhCDR1 having SEQ ID NO:11, a vhCDR2 having SEQ ID NO:12 and a vhCDR3 having SEQ ID NO:13, and wherein said heavy variable domain and said variable light domain bind CD38.

[0012] In a further aspect, the invention provides heterodimeric antibodies comprising: a) a first monomer comprising: i) a first Fc domain; ii) an anti-CD3 scFv comprising a scFv variable light domain, an scFv linker and a scFv variable heavy domain; wherein said scFv is covalently attached to the N-terminus of said Fc domain using a domain linker; b) a second monomer comprising a heavy chain comprising: i) a heavy variable domain; and ii) a heavy chain constant domain comprising a second Fc domain; and c) a light chain comprising a variable light domain and a variable light constant domain. In this aspect, the scFv variable light domain comprises: a vlCDR1 having SEQ ID NO:33, a vlCDR2 having SEQ ID NO:34 and a vlCDR3 having SEQ ID NO:35, said scFv variable heavy domain comprises a vhCDR1 having SEQ ID NO:29, a vhCDR2 having SEQ ID NO:30 and a vhCDR3 having SEQ ID NO:31, and wherein said heavy variable domain and said variable light domain bind CD38.

[0013] In a further aspect, the invention provides heterodimeric antibodies comprising: a) a first monomer comprising: i) a first Fc domain; ii) an anti-CD3 scFv comprising a scFv variable light domain, an scFv linker and a scFv variable heavy domain; wherein said scFv is covalently attached to the N-terminus of said Fc domain using a domain linker; b) a second monomer comprising a heavy chain comprising: i) a heavy variable domain; and ii) a heavy chain constant domain comprising a second Fc domain; and c) a light chain comprising a variable light domain and a variable light constant domain. In this aspect, the scFv variable light domain comprises: a vlCDR1 having SEQ ID NO:42, a vlCDR2 having SEQ ID NO:43 and a vlCDR3 having SEQ ID NO:44, said scFv variable heavy domain comprises a vhCDR1 having SEQ ID NO:38, a vhCDR2 having SEQ ID NO:39 and a vhCDR3 having SEQ ID NO:40, and wherein said heavy variable domain and said variable light domain bind CD38.

[0014] In an additional aspect, the “bottle opener” heterodimeric antibodies of the invention have a scFv that binds CD3 and vh and vl domains, wherein the variable light domain comprises: a vlCDR1 having the sequence RASQNVDTWVA (SEQ ID NO:69), a vlCDR2 having the sequence SASYRYS (SEQ ID NO:70) and a vlCDR3 having the sequence QQYDSYPLT (SEQ ID NO:71), said variable heavy domain comprises a vhCDR1 having the sequence RSWMN (SEQ ID NO:65), a vhCDR2 having the sequence EINPDSSTINYATSVKG (SEQ ID NO:66) and a vhCDR3 having the sequence YGNWFPY (SEQ ID NO:67).

[0015] In additional embodiments, the variable light domain comprises: a vlCDR1 having the sequence RASQNVDTNVA (SEQ ID NO:78), a vlCDR2 having the sequence SASYRYS (SEQ ID NO:79) and a vlCDR3 having the sequence QQYDSYPLT (SEQ ID NO:80), said variable heavy domain comprises a vhCDR1 having the sequence RSWMN (SEQ ID NO:74), a vhCDR2 having the sequence EINPDSSTINYATSVKG (SEQ ID NO:75) and a vhCDR3 having the sequence YGNWFPY (SEQ ID NO:76).

[0016] In a further aspect, the invention provides heterodimeric antibodies comprising: a) a first monomer comprising: i) a first heavy chain comprising: 1) a first variable heavy domain; 2) a first constant heavy chain comprising a first Fc domain; 3) a scFv comprising a scFv variable light domain, an scFv linker and a scFv variable heavy domain; wherein said scFv is covalently attached to the C-terminus of said Fc domain using a domain linker; b) a second monomer comprising a second heavy chain comprising a second variable heavy domain and a second constant heavy chain comprising a second Fc domain; and c) a common light chain comprising a variable light domain and a constant light domain; wherein said first and said second Fc domains have a set of amino acid substitutions selected from the group consisting of S364K/E357Q: L368D/K370S; L368D/K370S: S364K; L368E/K370S: S364K; T411T/E360E/Q362E: D401K; L368D/K370S: S364K/E357L and K370S: S364K/E357Q, and wherein said first variable heavy domain and said variable light domain bind human CD38 (SEQ ID NO:131), said second variable heavy domain and said variable light domain bind human CD38 (SEQ ID NO:131), and said scFv binds human CD3 (SEQ ID NO:129).

[0017] The invention further provides a heterodimeric antibody comprising: a) a first monomer comprising a first Fc domain and an anti-CD3 scFv comprising (i) a scFv variable light domain comprising vlCDR1 as set forth in SEQ ID NO:15, vlCDR2 as set forth in SEQ ID NO:16, and vlCDR3 as set forth in SEQ ID NO:17, and (ii) a scFv variable heavy domain comprising vhCDR1 as set forth in SEQ ID NO:11, vhCDR2 as set forth in SEQ ID NO:12, and vhCDR3 as set forth in SEQ ID NO:13, wherein said scFv is covalently attached to the N-terminus of said Fc domain using a domain linker; b) a second monomer comprising i) an anti-CD38 heavy variable domain comprising vhCDR1 as set forth in SEQ ID NO:65, vhCDR2 as set forth in SEQ ID NO:66, and vhCDR3 as set forth in SEQ ID NO:67, and ii) a heavy constant domain comprising a second Fc domain and; and c) a light chain comprising a variable constant domain and an anti-CD38 variable light domain comprising vlCDR1 as set forth in SEQ ID NO:69, vlCDR2 as set forth in SEQ ID NO:70, and vlCDR3 as set forth in SEQ ID NO:71. Optionally, the anti-CD3 scFv comprises an amino acid sequence at least 90% identical to (e.g., 100% identical to) the amino acid sequence set forth in SEQ ID NO: 18; the anti-CD38 variable light domain comprises an amino acid sequence at least 90% identical to (e.g., 100% identical to) the amino acid sequence set forth in SEQ ID NO:68; the anti-CD38 heavy variable domain comprises an amino acid sequence at least 90% identical to (e.g., 100% identical to) the amino acid sequence set forth in SEQ ID NO:64; the first monomer comprises an amino acid sequence at least 90% identical to (e.g., 100% identical to) the amino acid sequence set forth in SEQ ID NO:335; the second monomer comprises an amino acid sequence at least 90% identical to (e.g., 100% identical to) the amino acid sequence set forth in SEQ ID NO:82; and/or the light chain comprises an amino acid sequence at least 90% identical to (e.g., 100% identical to) the amino acid sequence set forth in SEQ ID NO:84.

[0018] Also provided is a heterodimeric antibody comprising: a) a first monomer comprising a first Fc domain and an anti-CD3 scFv comprising (i) a scFv variable light domain comprising vlCDR1 as set forth in SEQ ID NO:42, vlCDR2 as set forth in SEQ ID NO:43, and vlCDR3 as set forth in SEQ ID NO:44, and (ii) a scFv variable heavy domain comprising vhCDR1 as set forth in SEQ ID NO:38, vhCDR2 as set forth in SEQ ID NO:39, and vhCDR3 as set forth in SEQ ID NO:40, wherein said scFv is covalently attached to the N-terminus of said Fc domain using a domain linker; b) a second monomer comprising i) an anti-CD38 heavy variable domain comprising vhCDR1 as set forth in SEQ ID NO:65, vhCDR2 as set forth in SEQ ID NO:66, and vhCDR3 as set forth in SEQ ID NO:67, and ii) a heavy constant domain comprising a second Fc domain and; and c) a light chain comprising a variable constant domain and an anti-CD38 variable light domain comprising vlCDR1 as set forth in SEQ ID NO:69, vlCDR2 as set forth in SEQ ID NO:70, and vlCDR3 as set forth in SEQ ID NO:71. Optionally, the anti-CD3 scFv comprises an amino acid sequence at least 90% identical to (e.g., 100% identical to) the amino acid sequence set forth in SEQ ID NO: 18; the anti-CD38 variable light domain comprises an amino acid sequence at least 90% identical to (e.g., 100% identical to) the amino acid sequence set forth in SEQ ID NO:355; the anti-CD38 heavy variable domain comprises an amino acid sequence at least 90% identical to (e.g., 100% identical to) the amino acid sequence set forth in SEQ ID NO:73; the first monomer comprises an amino acid sequence at least 90% identical to (e.g., 100% identical to) the amino acid sequence set forth in SEQ ID NO:107; the second monomer comprises an amino acid sequence at least 90% identical to (e.g., 100% identical to) the amino acid sequence set forth in SEQ ID NO: 106; and/or the light chain comprises an amino acid sequence at least 90% identical to (e.g., 100% identical to) the amino acid sequence set forth in SEQ ID NO:108.

[0019] The invention also provides a heterodimeric antibody comprising: a) a first monomer comprising a first Fc domain and an anti-CD3 scFv comprising (i) a scFv variable light domain comprising vlCDR1 as set forth in SEQ ID NO:15, vlCDR2 as set forth in SEQ ID NO:16, and vlCDR3 as set forth in SEQ ID NO:17, and (ii) a scFv variable heavy domain comprising vhCDR1 as set forth in SEQ ID NO:11, vhCDR2 as set forth in SEQ ID NO:12, and vhCDR3 as set forth in SEQ ID NO:13, wherein said scFv is covalently attached to the N-terminus of said Fc domain using a domain linker; b) a second monomer comprising i) an anti-CD38 heavy variable domain comprising vhCDR1 as set forth in SEQ ID NO:73, vhCDR2 as set forth in SEQ ID NO:74, and vhCDR3 as set forth in SEQ ID NO:75, and ii) a heavy constant domain comprising a second Fc domain and; and c) a light chain comprising a variable constant domain and an anti-CD38 variable light domain comprising vlCDR1 as set forth in SEQ ID NO:78, vlCDR2 as set forth in SEQ ID NO:79, and vlCDR3 as set forth in SEQ ID NO:80. Optionally, the anti-CD3 scFv comprises an amino acid sequence at least 90% identical to (e.g., 100% identical to) the amino acid sequence set forth in SEQ ID NO: 45; the anti-CD38 variable light domain comprises an amino acid sequence at least 90% identical to (e.g., 100% identical to) the amino acid sequence set forth in SEQ ID NO:68; the anti-CD38 heavy variable domain comprises an amino acid sequence at least 90% identical to (e.g., 100% identical to) the amino acid sequence set forth in SEQ ID NO:64; the first monomer comprises an amino acid sequence at least 90% identical to (e.g., 100% identical to) the amino acid sequence set forth in SEQ ID NO:110; the second monomer comprises an amino acid sequence at least 90% identical to (e.g., 100% identical to) the amino acid sequence set forth in SEQ ID NO:109; and/or the light chain comprises an amino acid sequence at least 90% identical to (e.g., 100% identical to) the amino acid sequence set forth in SEQ ID NO:111.

[0020] In a further aspect, the invention provides heterodimeric antibodies comprising: a) a first monomer comprising: i) a first heavy chain comprising: 1) a first variable heavy domain; 2) a first constant heavy domain comprising a first Fc domain; and 3) a first variable light domain, wherein said first variable light domain is covalently attached to the C-terminus of said first Fc domain using a domain linker; b) a second monomer comprising: i) a second variable heavy domain; ii) a second constant heavy domain comprising a second Fc domain; and iii) a third variable heavy domain, wherein said second variable heavy domain is covalently attached to the C-terminus of said second Fc domain using a domain linker; c) a common light chain comprising a variable light domain and a constant light domain; wherein said first and said second Fc domain have a set of amino acid substitutions selected from the group consisting of S364K/E357Q: L368D/K370S; L368D/K370S: S364K; L368E/K370S: S364K; T411T/E360E/Q362E: D401K; L368D/K370S: S364K/E357L and K370S: S364K/E357Q, wherein said first variable heavy domain and said variable light domain bind human CD38 (SEQ ID NO:131), said second variable heavy domain and said variable light domain bind said human CD38 (SEQ ID NO:131), and said second variable light domain and said third variable heavy domain binds human CD3 (SEQ ID NO:129).

[0021] In a further aspect, the invention provides heterodimeric antibodies comprising: a) a first monomer comprising: i) a first heavy chain comprising: 1) a first variable heavy domain; 2) a first constant heavy chain comprising a first CH1 domain and a first Fc domain; 3) a scFv comprising a scFv variable light domain, an scFv linker and a scFv variable heavy domain; wherein said scFv is covalently attached between the C-terminus of said CH1 domain and the N-terminus of said first Fc domain using domain linkers; b) a second monomer comprising a second heavy chain comprising a second variable heavy domain and a second constant heavy chain comprising a second Fc domain; and c) a common light chain comprising a variable light domain and a constant light domain; wherein said first and said second Fc domain have a set of amino acid substitutions selected from the group consisting of S364K/E357Q: L368D/K370S; L368D/K370S: S364K; L368E/K370S: S364K; T411T/E360E/Q362E: D401K; L368D/K370S: S364K/E357L and K370S: S364K/E357Q, wherein said first variable heavy domain and said variable light domain bind human CD38 (SEQ ID NO:131), said second variable heavy domain and said variable light domain bind said human CD38 (SEQ ID NO:131), and said scFv binds human CD3 (SEQ ID NO:129).

[0022] In a further aspect, the invention provides heterodimeric antibodies comprising: a) a first monomer comprising: i) a first heavy chain comprising: 1) a first variable heavy domain; 2) a first constant heavy domain comprising a first Fc domain; and 3) a first variable light domain, wherein said second variable light domain is covalently attached between the C-terminus of the CH1 domain of said first constant heavy domain and the N-terminus of said first Fc domain using domain linkers; b) a second monomer comprising: i) a second variable heavy domain; ii) a second constant heavy domain comprising a second Fc domain; and iii) a third variable heavy domain, wherein said second variable heavy domain is covalently attached to the C-terminus of said second Fc domain using a domain linker; c) a common light chain comprising a variable light domain and a constant light domain; wherein said first and said second Fc domains have a set of amino acid substitutions selected from the group consisting of S364K/E357Q: L368D/K370S; L368D/K370S: S364K; L368E/K370S: S364K; T411T/E360E/Q362E: D401K; L368D/K370S: S364K/E357L and K370S: S364K/E357Q, wherein said first variable heavy domain and said variable light domain bind human CD38 (SEQ ID NO:131), said second variable heavy domain and said variable light domain bind said human CD38 (SEQ ID NO:131), and said second variable light domain and said third variable heavy domain binds human CD3 (SEQ ID NO:129).

[0023] In an additional aspect, the invention provides heterodimeric antibodies comprising a) a first monomer comprising: i) a first heavy chain comprising: 1) a first variable heavy domain; 2) a first constant heavy chain comprising a first CH1 domain and a first Fc domain; 3) a scFv comprising a scFv variable light domain, an scFv linker and a scFv variable heavy domain; wherein said scFv is covalently attached between the C-terminus of said CH1 domain and the N-terminus of said first Fc domain using domain linkers; b) a second monomer comprising a second Fc domain; and c) a light chain comprising a variable light domain and a constant light domain; wherein said first and said second Fc domain have a set of amino acid substitutions selected from the group consisting of S364K/E357Q: L368D/K370S; L368D/K370S: S364K; L368E/K370S: S364K; T411T/E360E/Q362E: D401K; L368D/K370S: S364K/E357L and K370S: S364K/E357Q, wherein said first variable heavy domain and said variable light domain bind human CD38 (SEQ ID NO:131), said scFv binds human CD3 (SEQ ID NO:129).

[0024] In an additional aspect, in some embodiments the heterodimeric antibodies comprise a first Fc domain and a second Fc domain which comprise a set of variants selected from the group consisting of S364K/E357Q: L368D/K370S; L368D/K370S: S364K; L368E/K370S: S364K; T411T/E360E/Q362E: D401K; L368D/K370S: S364K/E357L and K370S: S364K/E357Q.

[0025] In further aspects the scFv comprise scFv linkers that are charged linkers.

[0026] In additional aspects the heavy chain constant domain of the heterodimeric antibodies outlined herein comprise the amino acid substitutions N208D/Q295E/N384D/Q418E/N421D.

[0027] In a further aspect, the heterodimeric antibodies of the invention have first and second Fc domains which comprise the amino acid substitutions E233P/L234V/L235A/G236del/S267K.

[0028] In an additional aspect, the invention provides nucleic acid composition encoding the heterodimeric antibodies of the invention that comprises a) a first nucleic acid encoding said first monomer; b) a second nucleic acid encoding said second monomer; and c) a third nucleic acid encoding said light chain.

[0029] In a further aspect, the invention provides expression vector compositions comprising: a) a first expression vector comprising a nucleic acid encoding said first monomer; b) a second expression vector comprising a nucleic acid encoding said second monomer; and c) a third expression vector comprising a nucleic acid encoding said light chain. The invention further provides host cells comprising either the nucleic acid compositions or the expression vector compositions.

[0030] The invention further provides methods of making the heterodimeric antibodies comprising culturing the host cells under conditions wherein said antibody is expressed, and recovering said antibody.

[0031] The invention further provides methods of treating cancer comprising administering a heterodimeric antibody of the invention to a patient in need thereof.

### BRIEF DESCRIPTION OF THE DRAWINGS

[0032] FIGS. 1A and 1B depict several formats of the present invention. Two forms of the “bottle opener” format are depicted, one with the anti-CD3 antigen binding domain comprising a scFv and the anti-CD38 antigen binding domain comprising a Fab, and one with these reversed. The mAb-Fv, mAb-scFv, Central-scFv and Central-Fv formats are all shown. In addition, “one-armed” formats, where one monomer just comprises an Fc domain, are shown, both a one arm Central-scFv and a one arm Central-Fv. A dual scFv format is also shown.

[0033] FIG. 2 depicts the sequences of the “High CD3” anti-CD3_H1.30_L1.47 construct, including the variable heavy and light domains (CDRs underlined), as well as the individual vl and vhCDRs, as well as an scFv construct with a charged linker (double underlined). As is true of all the sequences depicted in the Figures, this charged linker may be replaced by an uncharged linker or a different charged linker, as needed.

[0034] FIG. 3 depicts the sequences of the “High-Int #1” Anti-CD3_H1.32_L1.47 construct, including the variable heavy and light domains (CDRs underlined), as well as the individual vl and vhCDRs, as well as an scFv construct with a charged linker (double underlined). As is true of all the sequences depicted in the Figures, this charged linker may be replaced by an uncharged linker or a different charged linker, as needed.

[0035] FIG. 4 depicts the sequences of the “High-Int #2” Anti-CD3_H1.89_11.47 construct, including the variable heavy and light domains (CDRs underlined), as well as the individual vl and vhCDRs, as well as an scFv construct with a charged linker (double underlined). As is true of all the sequences depicted in the Figures, this charged linker may be replaced by an uncharged linker or a different charged linker, as needed.

[0036] FIG. 5 depicts the sequences of the “High-Int #3” Anti-CD3_H1.90_L1.47 construct, including the variable heavy and light domains (CDRs underlined), as well as the individual vl and vhCDRs, as well as an scFv construct with a charged linker (double underlined). As is true of all the sequences depicted in the Figures, this charged linker may be replaced by an uncharged linker or a different charged linker, as needed.

[0037] FIG. 6 depicts the sequences of the “Int” Anti-CD3_H1.90_11.47 construct, including the variable heavy and light domains (CDRs underlined), as well as the individual vl and vhCDRs, as well as an scFv construct with a charged linker (double underlined). As is true of all the sequences depicted in the Figures, this charged linker may be replaced by an uncharged linker or a different charged linker, as needed.

[0038] FIG. 7 depicts the sequences of the “Low” Anti-CD3_H1.31_11.47 construct, including the variable heavy and light domains (CDRs underlined), as well as the individual vl and vhCDRs, as well as an scFv construct with a charged linker (double underlined). As is true of all the sequences depicted in the Figures, this charged linker may be replaced by an uncharged linker or a different charged linker, as needed.

[0039] FIG. 8 depicts the sequences of the High CD38: OKT10_H1.77_11.24 construct, including the variable heavy and light domains (CDRs underlined), as well as the individual vl and vhCDRs, as well as an scFv construct with a charged linker (double underlined).

[0040] FIG. 9 depicts the sequences of the intermediate CD38: OKT10_H1L1.24 construct, including the variable heavy and light domains (CDRs underlined), as well as the individual vl and vhCDRs, as well as an scFv construct with a charged linker (double underlined).

[0041] FIG. 10 depicts the sequences of the Low CD38: OKT10_H1L1 construct, including the variable heavy and light domains (CDRs underlined), as well as the individual vl and vhCDRs, as well as an scFv construct with a charged linker (double underlined).

[0042] FIG. 11 depicts the sequences of XENP15331.

[0043] FIG. 12 depicts the sequences of XENP13243.

[0044] FIG. 13 depicts the sequences of XENP14702.

[0045] FIG. 14 depicts the sequences of XENP15426.

[0046] FIG. 15 depicts the sequences of XENP14701.

[0047] FIG. 16 depicts the sequence of XENP14703.

[0048] FIG. 17 depicts the sequence of XENP13243.

[0049] FIG. 18 depicts the sequences of XENP18967.

[0050] FIG. 19 depicts the sequences of XENP18971.

[0051] FIG. 20 depicts the sequences of XENP18969.

[0052] FIG. 21 depicts the sequences of XENP18970.

[0053] FIG. 22 depicts the sequences of XENP18972.

[0054] FIG. 23 depicts the sequences of XENP18973.

[0055] FIG. 24 depicts the sequences of XENP15055.

[0056] FIG. 25 depicts the sequences of XENP13544.

[0057] FIG. 26 depicts the sequences of XENP13694.

[0058] FIG. 27 depicts the sequence of human CD3ε.

[0059] FIG. 28 depicts the full length (SEQ ID NO:130) and extracellular domain (ECD; SEQ ID NO:131) of the human CD38 protein.

[0060] FIGS. 29A-29E depict useful pairs of heterodimerization variant sets (including skew and pI variants).

[0061] FIG. 30 depict a list of isosteric variant antibody constant regions and their respective substitutions. pI_(−) indicates lower pI variants, while pI_(+) indicates higher pI variants. These can be optionally and independently combined with other heterodimerization variants of the invention (and other variant types as well, as outlined herein).

[0062] FIG. 31 depict useful ablation variants that ablate FcγR binding (sometimes referred to as “knock outs” or “KO” variants).

[0063] FIG. 32 show two particularly useful embodiments of the invention.

[0064] FIGS. 33A and 33B depicts a number of charged scFv linkers that find use in increasing or decreasing the pI of heterodimeric antibodies that utilize one or more scFv as a component. A single prior art scFv linker with a single charge is referenced as “Whitlow”, from Whitlow et al., Protein Engineering 6(8):989-995 (1993). It should be noted that this linker was used for reducing aggregation and enhancing proteolytic stability in scFvs.

[0065] FIG. 34 depicts a list of engineered heterodimer-skewing Fc variants with heterodimer yields (determined by HPLC-CIEX) and thermal stabilities (determined by DSC). Not determined thermal stability is denoted by “n.d.”.

[0066] FIG. 35. Expression yields of bispecifics after protein A affinity purification.

[0067] FIG. 36. Cationic exchange purification chromatograms.

[0068] FIG. 37. Redirected T cell cytotoxicity assay, 24 h incubation, 10k RPMI8226 cells, 400k T cells. Test articles are anti-CD38 x anti-CD3 bispecifics. Detection was by LDH

[0069] FIG. 38. Redirected T cell cytotoxicity assay, 24 h incubation, 10k RPMI8226 cells, 500k human PBMCs. Test articles are anti-CD38 x anti-CD3 bispecifics. Detection was by LDH.

[0070] FIG. 39 depicts the sequences of XENP14419,

[0071] FIG. 40 depicts the sequences of XENP14420.

[0072] FIG. 41 depicts the sequences of XENP14421.

[0073] FIG. 42 depicts the sequences of XENP14422.

[0074] FIG. 43 depicts the sequences of XENP14423.

[0075] FIG. 44. Redirected T cell cytotoxicity assay, 96 h incubation, 40k RPMI8226 cells, 400k human PBMC. Test articles are anti-CD38 x anti-CD3 Fab-scFv-Fcs. Detection was by flow cytometry, specifically the disappearance of CD38+ cells.

[0076] FIG. 45. Further analysis of redirected T cell cytotoxicity assay described in FIG. 1. The first row shows the Mean Fluorescence Intensity (MFI) of activation marker CD69 on CD4+ and CD8+ T cells as detected by flow cytometry. The second row shows the percentage of CD4+ and CD8+ T cells that are Ki-67+, a measure of cell proliferation. The third row shows the intracellular Mean Fluorescence Intensity (MFI) of granzyme B inhibitor PI-9 on CD4+ and CD8+ T cells as detected by flow cytometry.

[0077] FIG. 46. Design of mouse study to examine anti-tumor activity of anti-CD38 x anti-CD3 Fab-scFv-Fc bispecifics.

[0078] FIG. 47. Tumor size measured by IVIS® as a function of time and treatment

[0079] FIG. 48. IVIS® bioluminescent images (Day 10)

[0080] FIG. 49. Depletion of CD38+ cells in cynomolgus monkeys following single doses of the indicated test articles

[0081] FIG. 50. T cell activation measured by CD69 Mean Fluorescence Intensity (MFI) in cynomolgus monkeys, color coding as in FIG. 49.

[0082] FIG. 51. Serum levels of IL-6, following single doses of the indicated test articles.

[0083] FIG. 52 depicts the sequences of XENP15427.

[0084] FIG. 53 depicts the sequences of XENP15428.

[0085] FIG. 54 depicts the sequences of XENP15429.

[0086] FIG. 55 depicts the sequences of XENP15430.

[0087] FIG. 56 depicts the sequences of XENP15431.

[0088] FIG. 57 depicts the sequences of XENP15432.

[0089] FIG. 58 depicts the sequences of XENP15433.

[0090] FIG. 59 depicts the sequences of XENP15434.

[0091] FIG. 60 depicts the sequences of XENP15435.

[0092] FIG. 61 depicts the sequences of XENP15436.

[0093] FIG. 62 depicts the sequences of XENP15437.

[0094] FIG. 63 depicts the sequences of XENP15438.

[0095] FIG. 64 shows binding affinities in a Biacore assay.

[0096] FIG. 65 shows the Heterodimer purity during stable pool generation using varied Light chain, Fab-Fc, and scFv-Fc ratios.

[0097] FIG. 66. Human IgM and IgG2 depletion by anti-CD38 x anti-CD3 bispecifics in a huPBMC mouse model.

[0098] FIGS. 67A-67B depicts stability-optimized, humanized anti-CD3 variant scFvs. Substitutions are given relative to the H1_L1.4 scFv sequence. Amino acid numbering is Kabat numbering.

[0099] FIGS. 68A-68Z. Amino acid sequences of stability-optimized, humanized anti-CD3 variant scFvs. CDRs are underlined. For each heavy chain/light chain combination, four sequences are listed: (i) scFv with C-terminal 6×His tag, (ii) scFv alone, (iii) VH alone, (iv) VL alone.

[0100] FIG. 69 Redirected T cell cytotoxicity assay, 24 h incubation, 10k RPMI8226 cells, 500k PBMC. Test articles are anti-CD38 (OKT10_H1L1, OKT10_H1.77_L1.24) x anti-CD3 Fab-scFv-Fcs. Detection was by LDH.

[0101] FIG. 70. huPBL-SCID Ig-depletion study. Test articles were dosed 8 d after PBMC engraftment at 0.03, 0.3, or 3 mg/kg. Route of administration was intraperitoneal. Blood samples were taken 14 d after PBMC engraftment, processed to serum, and assayed for human IgM and IgG2.

[0102] FIG. 71 depicts the sequences of XENP18967 Anti-CD38.

[0103] FIG. 72 depicts the sequences of XENP18971.

[0104] FIG. 73 depicts the sequences of XENP18969.

[0105] FIG. 74 depicts the sequences of XENP18970.

[0106] FIG. 75 depicts the sequences of XENP18972.

[0107] FIG. 76 depicts the sequences of XENP18973.

[0108] FIG. 77 shows a matrix of possible combinations for embodiments of the invention. An “A” means that the CDRs of the referenced CD3 sequences can be combined with the CDRs of CD38 construct on the left hand side. That is, for example for the top left hand cell, the vhCDRs from the variable heavy chain CD3 H1.30 sequence and the vl CDRs from the variable light chain of CD3 L1.47 sequence can be combined with the vhCDRs from the CD38 OKT10 H1.77 sequence and the vl CDRs from the OKT1011.24 sequence. A “B” means that the CDRs from the CD3 constructs can be combined with the variable heavy and light domains from the CD38 construct. That is, for example for the top left hand cell, the vhCDRs from the variable heavy chain CD3 H1.30 sequence and the vlCDRs from the variable light chain of CD3 L1.47 sequence can be combined with the variable heavy domain CD38 OKT10 H1.77 sequence and the OKT1011.24 sequence. A “C” is reversed, such that the variable heavy domain and variable light domain from the CD3 sequences are used with the CDRs of the CD38 sequences. A “D” is where both the variable heavy and variable light chains from each are combined. An “E” is where the scFv of the CD3 is used with the CDRs of the CD38 antigen binding domain construct, and an “F” is where the scFv of the CD3 is used with the variable heavy and variable light domains of the CD38 antigen binding domain.

[0109] FIG. 78. Cytotoxicity curves created from T cell dependent cell cytotoxicity (TDCC) assays against human cell line MOLM13. The antibody corresponding to each curve is provided in parenthesis.

[0110] FIG. 79. Cytotoxicity curves created from TDCC assays with cynomolgus peripheral blood mononuclear cells (PBMCs). The antibody corresponding to each curve is provided in parenthesis.

[0111] FIG. 80. CD38 expression on human cell lines (KMS12BM, MOLM13, OPM2, U937, SKM1).

[0112] FIG. 81. B-cell counts in cynomolgus monkeys before and after administration of CD3-x CD38-binding bispecific antibodies. The antibodies and dosing amount are provided above each graph (see Example 6), along with the relative affinity of each antibody for CD3 and CD38. Arrows indicate dosing days.

[0113] FIG. 82 depicts the sequences of XmAb18968 (412220).

[0114] FIGS. 83A-83D shows the sequences of several bottle opener format backbones, without the Fv sequences (e.g., the scFv and the vh and vl for the Fab side). As will be appreciated by those in the art and outlined below, these sequences can be used with any vh and vl pairs outlined herein, with one monomer including a scFv (optionally including a charged scFv linker) and the other monomer including the Fab sequences (e.g., a vh attached to the “Fab side heavy chain” and a vl attached to the “constant light chain”). The scFv can be anti-CD3 or anti-CD38, with the Fab being the other. That is, any Fv sequences outlined herein for CD3 and CD38 can be incorporated into these FIG. 83 backbones in any combination.

### DETAILED DESCRIPTION OF THE INVENTION

### I. Definitions

[0115] In order that the application may be more completely understood, several definitions are set forth below. Such definitions are meant to encompass grammatical equivalents.

[0116] By “ablation” herein is meant a decrease or removal of activity. Thus for example, “ablating FcγR binding” means the Fc region amino acid variant has less than 50% starting binding as compared to an Fc region not containing the specific variant, with less than 70-80-90-95-98% loss of activity being preferred, and in general, with the activity being below the level of detectable binding in a Biacore assay. Of particular use in the ablation of FcγR binding are those shown in FIG. 16.

[0117] By “ADCC” or “antibody dependent cell-mediated cytotoxicity” as used herein is meant the cell-mediated reaction wherein nonspecific cytotoxic cells that express FcγRs recognize bound antibody on a target cell and subsequently cause lysis of the target cell. ADCC is correlated with binding to FcγRIIIa; increased binding to FcγRIIIa leads to an increase in ADCC activity.

[0118] By “ADCP” or antibody dependent cell-mediated phagocytosis as used herein is meant the cell-mediated reaction wherein nonspecific cytotoxic cells that express FcγRs recognize bound antibody on a target cell and subsequently cause phagocytosis of the target cell.

[0119] By “modification” herein is meant an amino acid substitution, insertion, and/or deletion in a polypeptide sequence or an alteration to a moiety chemically linked to a protein. For example, a modification may be an altered carbohydrate or PEG structure attached to a protein. By “amino acid modification” herein is meant an amino acid substitution, insertion, and/or deletion in a polypeptide sequence. For clarity, unless otherwise noted, the amino acid modification is always to an amino acid coded for by DNA, e.g. the 20 amino acids that have codons in DNA and RNA.

[0120] By “amino acid substitution” or “substitution” herein is meant the replacement of an amino acid at a particular position in a parent polypeptide sequence with a different amino acid. In particular, in some embodiments, the substitution is to an amino acid that is not naturally occurring at the particular position, either not naturally occurring within the organism or in any organism. For example, the substitution E272Y refers to a variant polypeptide, in this case an Fc variant, in which the glutamic acid at position 272 is replaced with tyrosine. For clarity, a protein which has been engineered to change the nucleic acid coding sequence but not change the starting amino acid (for example exchanging CGG (encoding arginine) to CGA (still encoding arginine) to increase host organism expression levels) is not an “amino acid substitution”; that is, despite the creation of a new gene encoding the same protein, if the protein has the same amino acid at the particular position that it started with, it is not an amino acid substitution.

[0121] By “amino acid insertion” or “insertion” as used herein is meant the addition of an amino acid sequence at a particular position in a parent polypeptide sequence. For example, −233E or 233E designates an insertion of glutamic acid after position 233 and before position 234. Additionally, −233ADE or A233ADE designates an insertion of AlaAspGlu after position 233 and before position 234.

[0122] By “amino acid deletion” or “deletion” as used herein is meant the removal of an amino acid sequence at a particular position in a parent polypeptide sequence. For example, E233- or E233# or E233( ) designates a deletion of glutamic acid at position 233. Additionally, EDA233- or EDA233# designates a deletion of the sequence GluAspAla that begins at position 233.

[0123] By “variant protein” or “protein variant”, or “variant” as used herein is meant a protein that differs from that of a parent protein by virtue of at least one amino acid modification. Protein variant may refer to the protein itself, a composition comprising the protein, or the amino sequence that encodes it. Preferably, the protein variant has at least one amino acid modification compared to the parent protein, e.g. from about one to about seventy amino acid modifications, and preferably from about one to about five amino acid modifications compared to the parent. As described below, in some embodiments the parent polypeptide, for example an Fc parent polypeptide, is a human wild type sequence, such as the Fc region from IgG1, IgG2, IgG3 or IgG4, although human sequences with variants can also serve as “parent polypeptides”, for example the IgG1/2 hybrid of FIG. 19. The protein variant sequence herein will preferably possess at least about 80% identity with a parent protein sequence, and most preferably at least about 90% identity, more preferably at least about 95-98-99% identity. Variant protein can refer to the variant protein itself, compositions comprising the protein variant, or the DNA sequence that encodes it. Accordingly, by “antibody variant” or “variant antibody” as used herein is meant an antibody that differs from a parent antibody by virtue of at least one amino acid modification, “IgG variant” or “variant IgG” as used herein is meant an antibody that differs from a parent IgG (again, in many cases, from a human IgG sequence) by virtue of at least one amino acid modification, and “immunoglobulin variant” or “variant immunoglobulin” as used herein is meant an immunoglobulin sequence that differs from that of a parent immunoglobulin sequence by virtue of at least one amino acid modification. “Fc variant” or “variant Fc” as used herein is meant a protein comprising an amino acid modification in an Fc domain. The Fc variants of the present invention are defined according to the amino acid modifications that compose them. Thus, for example, N434S or 434S is an Fc variant with the substitution serine at position 434 relative to the parent Fc polypeptide, wherein the numbering is according to the EU index. Likewise, M428L/N434S defines an Fc variant with the substitutions M428L and N434S relative to the parent Fc polypeptide. The identity of the WT amino acid may be unspecified, in which case the aforementioned variant is referred to as 428L/434S. It is noted that the order in which substitutions are provided is arbitrary, that is to say that, for example, 428L/434S is the same Fc variant as M428L/N434S, and so on. For all positions discussed in the present invention that relate to antibodies, unless otherwise noted, amino acid position numbering is according to the EU index. The EU index or EU index as in Kabat or EU numbering scheme refers to the numbering of the EU antibody (Edelman et al., 1969, Proc Natl Acad Sci USA 63:78-85, hereby entirely incorporated by reference.) The modification can be an addition, deletion, or substitution. Substitutions can include naturally occurring amino acids and, in some cases, synthetic amino acids. Examples include U.S. Pat. No. 6,586,207; WO 98/48032; WO 03/073238; U52004-0214988A1; WO 05/35727A2; WO 05/74524A2; J. W. Chin et al., (2002), Journal of the American Chemical Society 124:9026-9027; J. W. Chin, & P. G. Schultz, (2002), ChemBioChem 11:1135-1137; J. W. Chin, et al., (2002), PICAS United States of America 99:11020-11024; and, L. Wang, & P. G. Schultz, (2002), Chem. 1-10, all entirely incorporated by reference.

[0124] As used herein, “protein” is meant at least two covalently attached amino acids, which includes proteins, polypeptides, oligopeptides and peptides. The peptidyl group may comprise naturally occurring amino acids and peptide bonds, or synthetic peptidomimetic structures, i.e. “analogs”, such as peptoids (see Simon et al., PNAS USA 89(20):9367 (1992), entirely incorporated by reference). The amino acids may either be naturally occurring or synthetic (e.g. not an amino acid that is coded for by DNA); as will be appreciated by those in the art. For example, homo-phenylalanine, citrulline, ornithine and noreleucine are considered synthetic amino acids for the purposes of the invention, and both D- and L-(R or S) configured amino acids may be utilized. The variants of the present invention may comprise modifications that include the use of synthetic amino acids incorporated using, for example, the technologies developed by Schultz and colleagues, including but not limited to methods described by Cropp & Shultz, 2004, Trends Genet. 20(12):625-30, Anderson et al., 2004, Proc Natl Acad Sci USA 101 (2):7566-71, Zhang et al., 2003, 303(5656):371-3, and Chin et al., 2003, Science 301(5635):964-7, all entirely incorporated by reference. In addition, polypeptides may include synthetic derivatization of one or more side chains or termini, glycosylation, PEGylation, circular permutation, cyclization, linkers to other molecules, fusion to proteins or protein domains, and addition of peptide tags or labels.

[0125] By “residue” as used herein is meant a position in a protein and its associated amino acid identity. For example, Asparagine 297 (also referred to as Asn297 or N297) is a residue at position 297 in the human antibody IgG1.

[0126] By “Fab” or “Fab region” as used herein is meant the polypeptide that comprises the VH, CH1, VL, and CL immunoglobulin domains. Fab may refer to this region in isolation, or this region in the context of a full length antibody, antibody fragment or Fab fusion protein. By “Fv” or “Fv fragment” or “Fv region” as used herein is meant a polypeptide that comprises the VL and VH domains of a single antibody. As will be appreciated by those in the art, these generally are made up of two chains.

[0127] By “IgG subclass modification” or “isotype modification” as used herein is meant an amino acid modification that converts one amino acid of one IgG isotype to the corresponding amino acid in a different, aligned IgG isotype. For example, because IgG1 comprises a tyrosine and IgG2 a phenylalanine at EU position 296, a F296Y substitution in IgG2 is considered an IgG subclass modification.

[0128] By “non-naturally occurring modification” as used herein is meant an amino acid modification that is not isotypic. For example, because none of the IgGs comprise a serine at position 434, the substitution 434S in IgG1, IgG2, IgG3, or IgG4 (or hybrids thereof) is considered a non-naturally occurring modification.

[0129] By “amino acid” and “amino acid identity” as used herein is meant one of the 20 naturally occurring amino acids that are coded for by DNA and RNA.

[0130] By “effector function” as used herein is meant a biochemical event that results from the interaction of an antibody Fc region with an Fc receptor or ligand. Effector functions include but are not limited to ADCC, ADCP, and CDC.

[0131] By “IgG Fc ligand” as used herein is meant a molecule, preferably a polypeptide, from any organism that binds to the Fc region of an IgG antibody to form an Fc/Fc ligand complex. Fc ligands include but are not limited to FcγRIs, FcγRIIs, FcγRIIIs, FcRn, C1q, C3, mannan binding lectin, mannose receptor, staphylococcal protein A, streptococcal protein G, and viral FcγR. Fc ligands also include Fc receptor homologs (FcRH), which are a family of Fc receptors that are homologous to the FcγRs (Davis et al., 2002, Immunological Reviews 190:123-136, entirely incorporated by reference). Fc ligands may include undiscovered molecules that bind Fc. Particular IgG Fc ligands are FcRn and Fc gamma receptors. By “Fc ligand” as used herein is meant a molecule, preferably a polypeptide, from any organism that binds to the Fc region of an antibody to form an Fc/Fc ligand complex.

[0132] By “Fc gamma receptor”, “FcγR” or “FcqammaR” as used herein is meant any member of the family of proteins that bind the IgG antibody Fc region and is encoded by an FcγR gene. In humans this family includes but is not limited to FcγRI (CD64), including isoforms FcγRIa, FcγRIb, and FcγRIc; FcγRII (CD32), including isoforms FcγRIIa (including allotypes H131 and R131), FcγRIIb (including FcγRIIb-1 and FcγRIIb-2), and FcγRIIc; and FcγRIII (CD16), including isoforms FcγRIIIa (including allotypes V158 and F158) and FcγRIIIb (including allotypes FcγRIIb-NA1 and FcγRIIb-NA2) (Jefferis et at, 2002, Immunol Lett 82:57-65, entirely incorporated by reference), as well as any undiscovered human FcγRs or FcγR isoforms or allotypes. An FcγR may be from any organism, including but not limited to humans, mice, rats, rabbits, and monkeys. Mouse FcγRs include but are not limited to FcγRI (CD64), FcγRII (CD32), FcγRIII (CD16), and FcγRIII-2 (CD16-2), as well as any undiscovered mouse FcγRs or FcγR isoforms or allotypes.

[0133] By “FcRn” or “neonatal Fc Receptor” as used herein is meant a protein that binds the IgG antibody Fc region and is encoded at least in part by an FcRn gene. The FcRn may be from any organism, including but not limited to humans, mice, rats, rabbits, and monkeys. As is known in the art, the functional FcRn protein comprises two polypeptides, often referred to as the heavy chain and light chain. The light chain is beta-2-microglobulin and the heavy chain is encoded by the FcRn gene. Unless otherwise noted herein, FcRn or an FcRn protein refers to the complex of FcRn heavy chain with beta-2-microglobulin. A variety of FcRn variants used to increase binding to the FcRn receptor, and in some cases, to increase serum half-life, are shown in the Figure Legend of FIG. 83.

[0134] By “parent polypeptide” as used herein is meant a starting polypeptide that is subsequently modified to generate a variant. The parent polypeptide may be a naturally occurring polypeptide, or a variant or engineered version of a naturally occurring polypeptide. Parent polypeptide may refer to the polypeptide itself, compositions that comprise the parent polypeptide, or the amino acid sequence that encodes it. Accordingly, by “parent immunoglobulin” as used herein is meant an unmodified immunoglobulin polypeptide that is modified to generate a variant, and by “parent antibody” as used herein is meant an unmodified antibody that is modified to generate a variant antibody. It should be noted that “parent antibody” includes known commercial, recombinantly produced antibodies as outlined below.

[0135] By “Fc” or “Fc region” or “Fc domain” as used herein is meant the polypeptide comprising the constant region of an antibody excluding the first constant region immunoglobulin domain and in some cases, part of the hinge. Thus Fc refers to the last two constant region immunoglobulin domains of IgA, IgD, and IgG, the last three constant region immunoglobulin domains of IgE and IgM, and the flexible hinge N-terminal to these domains. For IgA and IgM, Fc may include the J chain. For IgG, the Fc domain comprises immunoglobulin domains Cγ2 and Cγ3 (Cγ2 and Cγ3) and the lower hinge region between Cγ1 (Cγ1) and Cγ2 (Cγ2). Although the boundaries of the Fc region may vary, the human IgG heavy chain Fc region is usually defined to include residues C226 or P230 to its carboxyl-terminus, wherein the numbering is according to the EU index as in Kabat. In some embodiments, as is more fully described below, amino acid modifications are made to the Fc region, for example to alter binding to one or more FcγR receptors or to the FcRn receptor.

[0136] By “heavy constant region” herein is meant the CH1-hinge-CH2-CH3 portion of an antibody.

[0137] By “Fc fusion protein” or “immunoadhesin” herein is meant a protein comprising an Fc region, generally linked (optionally through a linker moiety, as described herein) to a different protein, such as a binding moiety to a target protein, as described herein. In some cases, one monomer of the heterodimeric antibody comprises an antibody heavy chain (either including an scFv or further including a light chain) and the other monomer is a Fc fusion, comprising a variant Fc domain and a ligand. In some embodiments, these “half antibody-half fusion proteins” are referred to as “Fusionbodies”.

[0138] By “position” as used herein is meant a location in the sequence of a protein. Positions may be numbered sequentially, or according to an established format, for example the EU index for antibody numbering.

[0139] By “target antigen” as used herein is meant the molecule that is bound specifically by the variable region of a given antibody. A target antigen may be a protein, carbohydrate, lipid, or other chemical compound. A wide number of suitable target antigens are described below.

[0140] By “strandedness” in the context of the monomers of the heterodimeric antibodies of the invention herein is meant that, similar to the two strands of DNA that “match”, heterodimerization variants are incorporated into each monomer so as to preserve the ability to “match” to form heterodimers. For example, if some pI variants are engineered into monomer A (e.g. making the pI higher) then steric variants that are “charge pairs” that can be utilized as well do not interfere with the pI variants, e.g. the charge variants that make a pI higher are put on the same “strand” or “monomer” to preserve both functionalities. Similarly, for “skew” variants that come in pairs of a set as more fully outlined below, the skilled artisan will consider pI in deciding into which strand or monomer that incorporates one set of the pair will go, such that pI separation is maximized using the pI of the skews as well.

[0141] By “target cell” as used herein is meant a cell that expresses a target antigen.

[0142] By “variable region” as used herein is meant the region of an immunoglobulin that comprises one or more Ig domains substantially encoded by any of the V.kappa., V.lamda., and/or VH genes that make up the kappa, lambda, and heavy chain immunoglobulin genetic loci respectively.

[0143] By “wild type or WT” herein is meant an amino acid sequence or a nucleotide sequence that is found in nature, including allelic variations. A WT protein has an amino acid sequence or a nucleotide sequence that has not been intentionally modified.

[0144] The antibodies of the present invention are generally isolated or recombinant. “Isolated,” when used to describe the various polypeptides disclosed herein, means a polypeptide that has been identified and separated and/or recovered from a cell or cell culture from which it was expressed. Ordinarily, an isolated polypeptide will be prepared by at least one purification step. An “isolated antibody,” refers to an antibody which is substantially free of other antibodies having different antigenic specificities. “Recombinant” means the antibodies are generated using recombinant nucleic acid techniques in exogeneous host cells.

[0145] “Specific binding” or “specifically binds to” or is “specific for” a particular antigen or an epitope means binding that is measurably different from a non-specific interaction. Specific binding can be measured, for example, by determining binding of a molecule compared to binding of a control molecule, which generally is a molecule of similar structure that does not have binding activity. For example, specific binding can be determined by competition with a control molecule that is similar to the target.

[0146] Specific binding for a particular antigen or an epitope can be exhibited, for example, by an antibody having a KD for an antigen or epitope of at least about 10⁻⁴ M, at least about 10⁻⁵ M, at least about 10⁻⁶ M, at least about 10⁻⁷ M, at least about 10⁻⁸ M, at least about 10⁻⁹ M, alternatively at least about 10⁻¹⁰ M, at least about 10⁻¹¹ M, at least about 10⁻¹² M, or greater, where KD refers to a dissociation rate of a particular antibody-antigen interaction. Typically, an antibody that specifically binds an antigen will have a KD that is 20-, 50-, 100-, 500-, 1000-, 5,000-, 10,000- or more times greater for a control molecule relative to the antigen or epitope.

[0147] Also, specific binding for a particular antigen or an epitope can be exhibited, for example, by an antibody having a KA or Ka for an antigen or epitope of at least 20-, 50-, 100-, 500-, 1000-, 5,000-, 10,000- or more times greater for the epitope relative to a control, where KA or Ka refers to an association rate of a particular antibody-antigen interaction.

### II. Overview

[0148] Bispecific antibodies that co-engage CD3 and a tumor antigen target have been designed and used to redirect T cells to attack and lyse targeted tumor cells. Examples include the BiTE and DART formats, which monovalently engage CD3 and a tumor antigen. These formats do not contain Fc domains and show very short serum half-lives in patients.

[0149] While the CD3-targeting approach has shown considerable promise, a common side effect of such therapies is the associated production of cytokines, often leading to toxic cytokine release syndrome. Because the anti-CD3 binding domain of the bispecific antibody engages all T cells, the high cytokine-producing CD4 T cell subset is recruited. Moreover, the CD4 T cell subset includes regulatory T cells, whose recruitment and expansion can potentially lead to immune suppression and have a negative impact on long-term tumor suppression. One such possible way to reduce cytokine production and possibly reduce the activation of CD4 T cells is by reducing the affinity of the anti-CD3 domain for CD3. However, too great of a reduction in affinity may lead to reduced efficacy of a therapeutic comprising the anti-CD3 domain.

[0150] Accordingly, in some embodiments the present invention provides antibody constructs comprising anti-CD3 antigen binding domains that are “strong” or “high affinity” binders to CD3 (e.g. one example are heavy and light variable domains depicted as H1.30_11.47 (optionally including a charged linker as appropriate)) and also bind to CD38. In various embodiments, the antibody construct binds to CD3ε with an affinity (K_{D}) of about 3-15 nM (e.g., 3-10 nM or 4-7 nM), optionally measured using the assays described in the Examples. In other embodiments, the present invention provides antibody constructs comprising anti-CD3 antigen binding domains that are “lite” or “lower affinity” binders to CD3. In this regard, the antibody construct optionally binds to CD3ε with an affinity (K_{D}) of about 51 nM or more (e.g., 51-100 nM), optionally measured using the assays described in the Examples. Additional embodiments provides antibody constructs comprising anti-CD3 antigen binding domains that have intermediate or “medium” affinity to CD3 that also bind to CD38. In various aspects, the antibody construct binds to CD3ε with an affinity (K_{D}) of about 15-50 nM (e.g., about 16-50 nM, 15-45 nM, about 20-40 nM, about 25-40 nM, or about 30-40 nM), optionally measured using the assays described in the Examples. In various embodiments, the antibody demonstrates a binding affinity for CD3ε that is less than XmAb13551 and greater than XmAb14702 described herein. As shown in the Examples, the affinity for CD38 of a bispecific antibody also has an effect on the efficacy of the antibody in targeting cells expressing CD38. Bispecific antibodies having “medium” or “low” affinity for CD38 are able to efficiently kill target cells in vitro and in vivo with reduced toxicity profiles. In various embodiments, bispecific antibodies demonstrating “high” affinity for CD38 bind to CD38 with an affinity (K_{D}), e.g., below 1 nM; bispecific antibodies demonstrating “medium” or “intermediate” affinity for CD38 bind CD38 with an affinity (K_{D}) of about, e.g., 1-10 nM (e.g., 2-8 nM or 3-7 nM); bispecific antibodies demonstrating “low” or “lite” affinity for CD38 bind CD38 with an affinity (K_{D}) of about, e.g., 11 nM or more (such as 11-100 nM), all optionally measured using the methods set forth in the Examples.

[0151] It should be appreciated that the “high, medium, low” anti-CD3 sequences of the present invention can be used in a variety of heterodimerization formats. While the majority of the disclosure herein uses the “bottle opener” format of heterodimers, these variable heavy and light sequences, as well as the scFv sequences (and Fab sequences comprising these variable heavy and light sequences) can be used in other formats, such as those depicted in FIG. 2 of WO Publication No. 2014/145806, the Figures, formats and legend of which is expressly incorporated herein by reference.

[0152] Accordingly, the present invention provides heterodimeric antibodies that bind to two different antigens, e.g the antibodies are “bispecific”, in that they bind two different target antigens, e.g. CD3 and CD38 in the present invention. These heterodimeric antibodies can bind these target antigens either monovalently (e.g. there is a single antigen binding domain such as a variable heavy and variable light domain pair) or bivalently (there are two antigen binding domains that each independently bind the antigen). The heterodimeric antibodies of the invention are based on the use different monomers which contain amino acid substitutions that “skew” formation of heterodimers over homodimers, as is more fully outlined below, coupled with “pI variants” that allow simple purification of the heterodimers away from the homodimers, as is similarly outlined below. For the heterodimeric bispecific antibodies of the invention, the present invention generally relies on the use of engineered or variant Fc domains that can self-assemble in production cells to produce heterodimeric proteins, and methods to generate and purify such heterodimeric proteins.

### III. Antibodies

[0153] The present invention relates to the generation of bispecific antibodies that bind CD3 and CD38, generally therapeutic antibodies (e.g., antibodies having high efficacy and reduced toxicity). As is discussed below, the term “antibody” is used generally. Antibodies that find use in the present invention can take on a number of formats as described herein, including traditional antibodies as well as antibody derivatives, fragments and mimetics, described herein.

[0154] Traditional antibody structural units typically comprise a tetramer. Each tetramer is typically composed of two identical pairs of polypeptide chains, each pair having one “light” (typically having a molecular weight of about 25 kDa) and one “heavy” chain (typically having a molecular weight of about 50-70 kDa). Human light chains are classified as kappa and lambda light chains. The present invention is directed to the IgG class, which has several subclasses, including, but not limited to IgG1, IgG2, IgG3, and IgG4. It should be noted that IgG1 has different allotypes with polymorphisms at 356 (D or E) and 358 (L or M). The sequences depicted herein use the 356D/358M allotype, however the other allotype is included herein. That is, any sequence inclusive of an IgG1 Fc domain included herein can have 356E/358L replacing the 356D/358M allotype.

[0155] In addition, many of the sequences herein have at least one cysteine at position 220 replaced by a serine; generally this is the on the “scFv monomer” side for most of the sequences depicted herein, although it can also be on the “Fab monomer” side, or both, to reduce disulfide formation. Specifically included within the sequences herein are one or both of these cysteines replaced (C220S).

[0156] Thus, “isotype” as used herein is meant any of the subclasses of immunoglobulins defined by the chemical and antigenic characteristics of their constant regions. It should be understood that therapeutic antibodies can also comprise hybrids of isotypes and/or subclasses. For example, as shown in US Publication 2009/0163699, incorporated by reference, the present invention covers pI engineering of IgG1/G2 hybrids.

[0157] The amino-terminal portion of each chain includes a variable region of about 100 to 110 or more amino acids primarily responsible for antigen recognition, generally referred to in the art and herein as the “Fv domain” or “Fv region”. In the variable region, three loops are gathered for each of the V domains of the heavy chain and light chain to form an antigen-binding site. Each of the loops is referred to as a complementarity-determining region (hereinafter referred to as a “CDR”), in which the variation in the amino acid sequence is most significant. “Variable” refers to the fact that certain segments of the variable region differ extensively in sequence among antibodies. Variability within the variable region is not evenly distributed. Instead, the V regions consist of relatively invariant stretches called framework regions (FRs) of 15-30 amino acids separated by shorter regions of extreme variability called “hypervariable regions” that are each 9-15 amino acids long or longer.

[0158] Each VH and VL is composed of three hypervariable regions (“complementary determining regions,” “CDRs”) and four FRs, arranged from amino-terminus to carboxy-terminus in the following order: FR1-CDR1-FR2-CDR2-FR3-CDR3-FR4.

[0159] The hypervariable region generally encompasses amino acid residues from about amino acid residues 24-34 (LCDR1; “L” denotes light chain), 50-56 (LCDR2) and 89-97 (LCDR3) in the light chain variable region and around about 31-35B (HCDR1; “H” denotes heavy chain), 50-65 (HCDR2), and 95-102 (HCDR3) in the heavy chain variable region; Kabat et al., SEQUENCES OF PROTEINS OF IMMUNOLOGICAL INTEREST, 5th Ed. Public Health Service, National Institutes of Health, Bethesda, Md. (1991) and/or those residues forming a hypervariable loop (e.g. residues 26-32 (LCDR1), 50-52 (LCDR2) and 91-96 (LCDR3) in the light chain variable region and 26-32 (HCDR1), 53-55 (HCDR2) and 96-101 (HCDR3) in the heavy chain variable region; Chothia and Lesk (1987) J. Mol. Biol. 196:901-917. Specific CDRs of the invention are described below.

[0160] As will be appreciated by those in the art, the exact numbering and placement of the CDRs can be different among different numbering systems. However, it should be understood that the disclosure of a variable heavy and/or variable light sequence includes the disclosure of the associated CDRs. Accordingly, the disclosure of each variable heavy region is a disclosure of the vhCDRs (e.g. vhCDR1, vhCDR2 and vhCDR3) and the disclosure of each variable light region is a disclosure of the vhCDRs (e.g. vlCDR1, vlCDR2 and vlCDR3).

[0161] Throughout the present specification, the Kabat numbering system is generally used when referring to a residue in the variable domain (approximately, residues 1-107 of the light chain variable region and residues 1-113 of the heavy chain variable region) and the EU numbering system for Fc regions (e.g, Kabat et al., supra (1991)).

[0162] The present invention provides a large number of different CDR sets. In this case, a “full CDR set” comprises the three variable light and three variable heavy CDRs, e.g. a vlCDR1, vlCDR2, vlCDR3, vhCDR1, vhCDR2 and vhCDR3. These can be part of a larger variable light or variable heavy domain, respectfully. In addition, as more fully outlined herein, the variable heavy and variable light domains can be on separate polypeptide chains, when a heavy and light chain is used (for example when Fabs are used), or on a single polypeptide chain in the case of scFv sequences.

[0163] The CDRs contribute to the formation of the antigen-binding, or more specifically, epitope binding site of antibodies. “Epitope” refers to a determinant that interacts with a specific antigen binding site in the variable region of an antibody molecule known as a paratope. Epitopes are groupings of molecules such as amino acids or sugar side chains and usually have specific structural characteristics, as well as specific charge characteristics. A single antigen may have more than one epitope.

[0164] The epitope may comprise amino acid residues directly involved in the binding (also called immunodominant component of the epitope) and other amino acid residues, which are not directly involved in the binding, such as amino acid residues which are effectively blocked by the specifically antigen binding peptide; in other words, the amino acid residue is within the footprint of the specifically antigen binding peptide.

[0165] Epitopes may be either conformational or linear. A conformational epitope is produced by spatially juxtaposed amino acids from different segments of the linear polypeptide chain. A linear epitope is one produced by adjacent amino acid residues in a polypeptide chain. Conformational and nonconformational epitopes may be distinguished in that the binding to the former but not the latter is lost in the presence of denaturing solvents.

[0166] An epitope typically includes at least 3, and more usually, at least 5 or 8-10 amino acids in a unique spatial conformation. Antibodies that recognize the same epitope can be verified in a simple immunoassay showing the ability of one antibody to block the binding of another antibody to a target antigen, for example “binning.”

[0167] The carboxy-terminal portion of each chain defines a constant region primarily responsible for effector function. Kabat et al. collected numerous primary sequences of the variable regions of heavy chains and light chains. Based on the degree of conservation of the sequences, they classified individual primary sequences into the CDR and the framework and made a list thereof (see SEQUENCES OF IMMUNOLOGICAL INTEREST, 5th edition, NIH publication, No. 91-3242, E. A. Kabat et al., entirely incorporated by reference).

[0168] In the IgG subclass of immunoglobulins, there are several immunoglobulin domains in the heavy chain. By “immunoglobulin (Ig) domain” herein is meant a region of an immunoglobulin having a distinct tertiary structure. Of interest in the present invention are the heavy chain domains, including, the constant heavy (CH) domains and the hinge domains. In the context of IgG antibodies, the IgG isotypes each have three CH regions. Accordingly, “CH” domains in the context of IgG are as follows: “CH1” refers to positions 118-220 according to the EU index as in Kabat. “CH2” refers to positions 237-340 according to the EU index as in Kabat, and “CH3” refers to positions 341-447 according to the EU index as in Kabat. As shown herein and described below, the pI variants can be in one or more of the CH regions, as well as the hinge region, discussed below.

[0169] It should be noted that the sequences depicted herein start at the CH1 region, position 118; the variable regions are not included except as noted. For example, the first amino acid of SEQ ID NO: 2, while designated as position“1” in the sequence listing, corresponds to position 118 of the CH1 region, according to EU numbering.

[0170] Another type of Ig domain of the heavy chain is the hinge region. By “hinge” or “hinge region” or “antibody hinge region” or “immunoglobulin hinge region” herein is meant the flexible polypeptide comprising the amino acids between the first and second constant domains of an antibody. Structurally, the IgG CH1 domain ends at EU position 220, and the IgG CH2 domain begins at residue EU position 237. Thus for IgG the antibody hinge is herein defined to include positions 221 (D221 in IgG1) to 236 (G236 in IgG1), wherein the numbering is according to the EU index as in Kabat. In some embodiments, for example in the context of an Fc region, the lower hinge is included, with the “lower hinge” generally referring to positions 226 or 230. As noted herein, pI variants can be made in the hinge region as well.

[0171] The light chain generally comprises two domains, the variable light domain (containing the light chain CDRs and together with the variable heavy domains forming the Fv region), and a constant light chain region (often referred to as CL or Cκ).

[0172] Another region of interest for additional substitutions, outlined below, is the Fc region.

[0173] Thus, the present invention provides different antibody domains. As described herein and known in the art, the heterodimeric antibodies of the invention comprise different domains within the heavy and light chains, which can be overlapping as well. These domains include, but are not limited to, the Fc domain, the CH1 domain, the CH2 domain, the CH3 domain, the hinge domain, the heavy constant domain (CH1-hinge-Fc domain or CH1-hinge-CH2-CH3), the variable heavy domain, the variable light domain, the light constant domain, FAb domains and scFv domains.

[0174] Thus, the “Fc domain” includes the -CH2-CH3 domain, and optionally a hinge domain. In the embodiments herein, when a scFv is attached to an Fc domain, it is the C-terminus of the scFv construct that is attached to the hinge of the Fc domain; for example, it is generally attached to the sequence EPKS which is the beginning of the hinge. The heavy chain comprises a variable heavy domain and a constant domain, which includes a CH1-optional hinge-Fc domain comprising a CH2-CH3. The light chain comprises a variable light chain and the light constant domain. An scFv comprises a variable heavy chain, an scFv linker, and a variable light domain. In most of the constructs and sequences outlined herein, C-terminus of the variable light chain is attached to the N-terminus of the scFv linker, the C-terminus of which is attached to the N-terminus of a variable heavy chain (N-vh-linker-vl-C) although that can be switched (N-vl-linker-vh-C). Thus, specifically included in the depiction and description of scFvs are the scFvs in either orientation.

[0175] Some embodiments of the invention comprise at least one scFv domain, which, while not naturally occurring, generally includes a variable heavy domain and a variable light domain, linked together by a scFv linker. As shown herein, there are a number of suitable scFv linkers that can be used, including traditional peptide bonds, generated by recombinant techniques.

[0176] The linker peptide may predominantly include the following amino acid residues: Gly, Ser, Ala, or Thr. The linker peptide should have a length that is adequate to link two molecules in such a way that they assume the correct conformation relative to one another so that they retain the desired activity. In one embodiment, the linker is from about 1 to 50 amino acids in length, preferably about 1 to 30 amino acids in length. In one embodiment, linkers of 1 to 20 amino acids in length may be used, with from about 5 to about 10 amino acids finding use in some embodiments. Useful linkers include glycine-serine polymers, including for example (GS)n, (GSGGS)n (SEQ ID NO:332), (GGGGS)n (SEQ ID NO:333), and (GGGS)n (SEQ ID NO:334), where n is an integer of at least one (and generally from 3 to 4), glycine-alanine polymers, alanine-serine polymers, and other flexible linkers. Alternatively, a variety of nonproteinaceous polymers, including but not limited to polyethylene glycol (PEG), polypropylene glycol, polyoxyalkylenes, or copolymers of polyethylene glycol and polypropylene glycol, may find use as linkers, that is may find use as linkers.

[0177] Other linker sequences may include any sequence of any length of CL/CH1 domain but not all residues of CL/CH1 domain; for example the first 5-12 amino acid residues of the CL/CH1 domains. Linkers can be derived from immunoglobulin light chain, for example Cκ or Cλ. Linkers can be derived from immunoglobulin heavy chains of any isotype, including for example Cγ1, Cγ2, Cγ3, Cγ4, Cα1, Cα2, Cδ, Cε, and Cμ. Linker sequences may also be derived from other proteins such as Ig-like proteins (e.g. TCR, FcR, KIR), hinge region-derived sequences, and other natural sequences from other proteins.

[0178] In some embodiments, the linker is a “domain linker”, used to link any two domains as outlined herein together. While any suitable linker can be used, many embodiments utilize a glycine-serine polymer, including for example (GS)n, (GSGGS)n (SEQ ID NO:332), (GGGGS)n (SEQ ID NO:333), and (GGGS)n (SEQ ID NO:334), where n is an integer of at least one (and generally from 3 to 4 to 5) as well as any peptide sequence that allows for recombinant attachment of the two domains with sufficient length and flexibility to allow each domain to retain its biological function. In some cases, and with attention being paid to “strandedness”, as outlined below, charged domain linkers, as used in some embodiments of scFv linkers can be used.

[0179] In some embodiments, the scFv linker is a charged scFv linker, a number of which are shown in FIG. 33. Accordingly, the present invention further provides charged scFv linkers, to facilitate the separation in pI between a first and a second monomer. That is, by incorporating a charged scFv linker, either positive or negative (or both, in the case of scaffolds that use scFvs on different monomers), this allows the monomer comprising the charged linker to alter the pI without making further changes in the Fc domains. These charged linkers can be substituted into any scFv containing standard linkers. Again, as will be appreciated by those in the art, charged scFv linkers are used on the correct “strand” or monomer, according to the desired changes in pI. For example, as discussed herein, to make triple F format heterodimeric antibody, the original pI of the Fv region for each of the desired antigen binding domains are calculated, and one is chosen to make an scFv, and depending on the pI, either positive or negative linkers are chosen.

[0180] Charged domain linkers can also be used to increase the pI separation of the monomers of the invention as well, and thus those included in FIG. 33 can be used in any embodiment herein where a linker is utilized.

[0181] In some embodiments, the antibodies are full length. By “full length antibody” herein is meant the structure that constitutes the natural biological form of an antibody, including variable and constant regions, including one or more modifications as outlined herein, particularly in the Fc domains to allow either heterodimerization formation or the purification of heterodimers away from homodimers. Full length antibodies generally include Fab and Fc domains, and can additionally contain extra antigen binding domains such as scFvs, as is generally depicted in the Figures.

[0182] In one embodiment, the antibody is an antibody fragment, as long as it contains at least one constant domain which can be engineered to produce heterodimers, such as pI engineering. Other antibody fragments that can be used include fragments that contain one or more of the CH1, CH2, CH3, hinge and CL domains of the invention that have been pI engineered. For example, Fc fusions are fusions of the Fc region (CH2 and CH3, optionally with the hinge region) fused to another protein. A number of Fc fusions are known the art and can be improved by the addition of the heterodimerization variants of the invention. In the present case, antibody fusions can be made comprising CH1; CH1, CH2 and CH3; CH2; CH3; CH2 and CH3; CH1 and CH3, any or all of which can be made optionally with the hinge region, utilizing any combination of heterodimerization variants described herein.

[0183] In particular, the formats depicted in FIG. 1 are antibodies, usually referred to as “heterodimeric antibodies”, meaning that the protein has at least two associated Fc sequences self-assembled into a heterodimeric Fc domain.

### Chimeric and Humanized Antibodies

[0184] In some embodiments, the antibody can be a mixture from different species, e.g. a chimeric antibody and/or a humanized antibody. In general, both “chimeric antibodies” and “humanized antibodies” refer to antibodies that combine regions from more than one species. For example, “chimeric antibodies” traditionally comprise variable region(s) from a mouse (or rat, in some cases) and the constant region(s) from a human. “Humanized antibodies” generally refer to non-human antibodies that have had the variable-domain framework regions swapped for sequences found in human antibodies. Generally, in a humanized antibody, the entire antibody, except the CDRs, is encoded by a polynucleotide of human origin or is identical to such an antibody except within its CDRs. The CDRs, some or all of which are encoded by nucleic acids originating in a non-human organism, are grafted into the beta-sheet framework of a human antibody variable region to create an antibody, the specificity of which is determined by the engrafted CDRs. The creation of such antibodies is described in, e.g., WO 92/11018, Jones, 1986, Nature 321:522-525, Verhoeyen et at, 1988, Science 239:1534-1536, all entirely incorporated by reference. “Backmutation” of selected acceptor framework residues to the corresponding donor residues is often required to regain affinity that is lost in the initial grafted construct (U.S. Pat. No. 5,530,101; U.S. Pat. No. 5,585,089; U.S. Pat. No. 5,693,761; U.S. Pat. No. 5,693,762; U.S. Pat. No. 6,180,370; U.S. Pat. No. 5,859,205; U.S. Pat. No. 5,821,337; U.S. Pat. No. 6,054,297; U.S. Pat. No. 6,407,213, all entirely incorporated by reference). The humanized antibody optimally also will comprise at least a portion of an immunoglobulin constant region, typically that of a human immunoglobulin, and thus will typically comprise a human Fc region. Humanized antibodies can also be generated using mice with a genetically engineered immune system. Roque et al., 2004, Biotechnol. Prog. 20:639-654, entirely incorporated by reference. A variety of techniques and methods for humanizing and reshaping non-human antibodies are well known in the art (See Tsurushita & Vasquez, 2004, Humanization of Monoclonal Antibodies, Molecular Biology of B Cells, 533-545, Elsevier Science (USA), and references cited therein, all entirely incorporated by reference). Humanization methods include but are not limited to methods described in Jones et al., 1986, Nature 321:522-525; Riechmann et al., 1988; Nature 332:323-329; Verhoeyen et at, 1988, Science, 239:1534-1536; Queen et al., 1989, Proc Natl Acad Sci, USA 86:10029-33; He et al., 1998, J. Immunol. 160: 1029-1035; Carter et al., 1992, Proc Natl Acad Sci USA 89:4285-9, Presta et al., 1997, Cancer Res. 57(20):4593-9; Gorman et at, 1991, Proc. Natl. Acad. Sci. USA 88:4181-4185; O'Connor et at, 1998, Protein Eng 11:321-8, all entirely incorporated by reference. Humanization or other methods of reducing the immunogenicity of nonhuman antibody variable regions may include resurfacing methods, as described for example in Roguska et al., 1994, Proc. Natl. Acad. Sci. USA 91:969-973, entirely incorporated by reference.

[0185] In certain embodiments, the antibodies of the invention comprise a heavy chain variable region from a particular germline heavy chain immunoglobulin gene and/or a light chain variable region from a particular germline light chain immunoglobulin gene. For example, such antibodies may comprise or consist of a human antibody comprising heavy or light chain variable regions that are “the product of” or “derived from” a particular germline sequence A human antibody that is “the product of” or “derived from” a human germline immunoglobulin sequence can be identified as such by comparing the amino acid sequence of the human antibody to the amino acid sequences of human germline immunoglobulins and selecting the human germline immunoglobulin sequence that is closest in sequence (i.e., greatest % identity) to the sequence of the human antibody. A human antibody that is “the product of” or “derived from” a particular human germline immunoglobulin sequence may contain amino acid differences as compared to the germline sequence, due to, for example, naturally-occurring somatic mutations or intentional introduction of site-directed mutation. However, a humanized antibody typically is at least 90% identical in amino acids sequence to an amino acid sequence encoded by a human germline immunoglobulin gene and contains amino acid residues that identify the antibody as being derived from human sequences when compared to the germline immunoglobulin amino acid sequences of other species (e.g., murine germline sequences). In certain cases, a humanized antibody may be at least 95, 96, 97, 98 or 99%, or even at least 96%, 97%, 98%, or 99% identical in amino acid sequence to the amino acid sequence encoded by the germline immunoglobulin gene. Typically, a humanized antibody derived from a particular human germline sequence will display no more than 10-20 amino acid differences from the amino acid sequence encoded by the human germline immunoglobulin gene (prior to the introduction of any skew, pI and ablation variants herein; that is, the number of variants is generally low, prior to the introduction of the variants of the invention). In certain cases, the humanized antibody may display no more than 5, or even no more than 4, 3, 2, or 1 amino acid difference from the amino acid sequence encoded by the germline immunoglobulin gene (again, prior to the introduction of any skew, pI and ablation variants herein; that is, the number of variants is generally low, prior to the introduction of the variants of the invention).

[0186] In one embodiment, the parent antibody has been affinity matured, as is known in the art. Structure-based methods may be employed for humanization and affinity maturation, for example as described in U.S. Ser. No. 11/004,590. Selection based methods may be employed to humanize and/or affinity mature antibody variable regions, including but not limited to methods described in Wu et al., 1999, J. Mol. Biol. 294:151-162; Baca et al., 1997, J. Biol. Chem. 272(16):10678-10684; Rosok et al., 1996, J. Biol. Chem. 271(37): 22611-22618; Rader et al., 1998, Proc. Natl. Acad. Sci. USA 95: 8910-8915; Krauss et al., 2003, Protein Engineering 16(10):753-759, all entirely incorporated by reference. Other humanization methods may involve the grafting of only parts of the CDRs, including but not limited to methods described in U.S. Ser. No. 09/810,510; Tan et al., 2002, J. Immunol. 169:1119-1125; De Pascalis et al., 2002, J. Immunol. 169:3076-3084, all entirely incorporated by reference.

### IV. Heterodimeric Antibodies

[0187] Accordingly, in some embodiments the present invention provides heterodimeric antibodies that rely on the use of two different heavy chain variant Fc domains that will self-assemble to form heterodimeric antibodies.

[0188] The present invention is directed to novel constructs to provide heterodimeric antibodies that allow binding to more than one antigen or ligand, e.g. to allow for bispecific binding. The heterodimeric antibody constructs are based on the self-assembling nature of the two Fc domains of the heavy chains of antibodies, e.g. two “monomers” that assemble into a “dimer”. Heterodimeric antibodies are made by altering the amino acid sequence of each monomer as more fully discussed below. Thus, the present invention is generally directed to the creation of heterodimeric antibodies which can co-engage antigens in several ways, relying on amino acid variants in the constant regions that are different on each chain to promote heterodimeric formation and/or allow for ease of purification of heterodimers over the homodimers.

[0189] Thus, the present invention provides bispecific antibodies. An ongoing problem in antibody technologies is the desire for “bispecific” antibodies that bind to two different antigens simultaneously, in general thus allowing the different antigens to be brought into proximity and resulting in new functionalities and new therapies. In general, these antibodies are made by including genes for each heavy and light chain into the host cells. This generally results in the formation of the desired heterodimer (A-B), as well as the two homodimers (A-A and B-B (not including the light chain heterodimeric issues)). However, a major obstacle in the formation of bispecific antibodies is the difficulty in purifying the heterodimeric antibodies away from the homodimeric antibodies and/or biasing the formation of the heterodimer over the formation of the homodimers.

[0190] There are a number of mechanisms that can be used to generate the heterodimers of the present invention. In addition, as will be appreciated by those in the art, these mechanisms can be combined to ensure high heterodimerization. Thus, amino acid variants that lead to the production of heterodimers are referred to as “heterodimerization variants”. As discussed below, heterodimerization variants can include steric variants (e.g. the “knobs and holes” or “skew” variants described below and the “charge pairs” variants described below) as well as “pI variants”, which allows purification of homodimers away from heterodimers. As is generally described in WO2014/145806, hereby incorporated by reference in its entirety and specifically as below for the discussion of “heterodimerization variants”, useful mechanisms for heterodimerization include “knobs and holes” (“KIH”; sometimes herein as “skew” variants (see discussion in WO2014/145806), “electrostatic steering” or “charge pairs” as described in WO2014/145806, pI variants as described in WO2014/145806, and general additional Fc variants as outlined in WO2014/145806 and below.

[0191] In the present invention, there are several basic mechanisms that can lead to ease of purifying heterodimeric antibodies; one relies on the use of pI variants, such that each monomer has a different pI, thus allowing the isoelectric purification of A-A, A-B and B-B dimeric proteins. Alternatively, some scaffold formats, such as the “triple F” format, also allows separation on the basis of size. As is further outlined below, it is also possible to “skew” the formation of heterodimers over homodimers. Thus, a combination of steric heterodimerization variants and pI or charge pair variants find particular use in the invention.

[0192] In general, embodiments of particular use in the present invention rely on sets of variants that include skew variants, that encourage heterodimerization formation over homodimerization formation, coupled with pI variants, which increase the pI difference between the two monomers.

[0193] Additionally, as more fully outlined below, depending on the format of the heterodimer antibody, pI variants can be either contained within the constant and/or Fc domains of a monomer, or charged linkers, either domain linkers or scFv linkers, can be used. That is, scaffolds that utilize scFv(s) such as the Triple F format can include charged scFv linkers (either positive or negative), that give a further pI boost for purification purposes. As will be appreciated by those in the art, some Triple F formats are useful with just charged scFv linkers and no additional pI adjustments, although the invention does provide pI variants that are on one or both of the monomers, and/or charged domain linkers as well. In addition, additional amino acid engineering for alternative functionalities may also confer pI changes, such as Fc, FcRn and KO variants.

[0194] In the present invention that utilizes pI as a separation mechanism to allow the purification of heterodimeric proteins, amino acid variants can be introduced into one or both of the monomer polypeptides; that is, the pI of one of the monomers (referred to herein for simplicity as “monomer A”) can be engineered away from monomer B, or both monomer A and B change be changed, with the pI of monomer A increasing and the pI of monomer B decreasing. As is outlined more fully below, the pI changes of either or both monomers can be done by removing or adding a charged residue (e.g. a neutral amino acid is replaced by a positively or negatively charged amino acid residue, e.g. glycine to glutamic acid), changing a charged residue from positive or negative to the opposite charge (aspartic acid to lysine) or changing a charged residue to a neutral residue (e.g. loss of a charge; lysine to serine.). A number of these variants are shown in the Figures.

[0195] Accordingly, this embodiment of the present invention provides for creating a sufficient change in pI in at least one of the monomers such that heterodimers can be separated from homodimers. As will be appreciated by those in the art, and as discussed further below, this can be done by using a “wild type” heavy chain constant region and a variant region that has been engineered to either increase or decrease it's pI (wt A-+B or wt A-B), or by increasing one region and decreasing the other region (A+-B- or A-B+).

[0196] Thus, in general, a component of some embodiments of the present invention are amino acid variants in the constant regions of antibodies that are directed to altering the isoelectric point (pI) of at least one, if not both, of the monomers of a dimeric protein to form “pI antibodies”) by incorporating amino acid substitutions (“pI variants” or “pI substitutions”) into one or both of the monomers. As shown herein, the separation of the heterodimers from the two homodimers can be accomplished if the pIs of the two monomers differ by as little as 0.1 pH unit, with 0.2, 0.3, 0.4 and 0.5 or greater all finding use in the present invention.

[0197] As will be appreciated by those in the art, the number of pI variants to be included on each or both monomer(s) to get good separation will depend in part on the starting pI of the components, for example in the triple F format, the starting pI of the scFv and Fab of interest. That is, to determine which monomer to engineer or in which “direction” (e.g. more positive or more negative), the Fv sequences of the two target antigens are calculated and a decision is made from there. As is known in the art, different Fvs will have different starting pIs which are exploited in the present invention. In general, as outlined herein, the pIs are engineered to result in a total pI difference of each monomer of at least about 0.1 logs, with 0.2 to 0.5 being preferred as outlined herein.

[0198] Furthermore, as will be appreciated by those in the art and outlined herein, in some embodiments, heterodimers can be separated from homodimers on the basis of size. As shown in FIG. 1 for example, several of the formats allow separation of heterodimers and homodimers on the basis of size.

[0199] In the case where pI variants are used to achieve heterodimerization, by using the constant region(s) of the heavy chain(s), a more modular approach to designing and purifying bispecific proteins, including antibodies, is provided. Thus, in some embodiments, heterodimerization variants (including skew and purification heterodimerization variants) are not included in the variable regions, such that each individual antibody must be engineered. In addition, in some embodiments, the possibility of immunogenicity resulting from the pI variants is significantly reduced by importing pI variants from different IgG isotypes such that pI is changed without introducing significant immunogenicity. Thus, an additional problem to be solved is the elucidation of low pI constant domains with high human sequence content, e.g. the minimization or avoidance of non-human residues at any particular position.

[0200] A side benefit that can occur with this pI engineering is also the extension of serum half-life and increased FcRn binding. That is, as described in U.S. Ser. No. 13/194,904 (incorporated by reference in its entirety), lowering the pI of antibody constant domains (including those found in antibodies and Fc fusions) can lead to longer serum retention in vivo. These pI variants for increased serum half life also facilitate pI changes for purification.

[0201] In addition, it should be noted that the pI variants of the heterodimerization variants give an additional benefit for the analytics and quality control process of bispecific antibodies, as the ability to either eliminate, minimize and distinguish when homodimers are present is significant. Similarly, the ability to reliably test the reproducibility of the heterodimeric antibody production is important.

### Heterodimerization Variants

[0202] The present invention provides heterodimeric proteins, including heterodimeric antibodies in a variety of formats, which utilize heterodimeric variants to allow for heterodimeric formation and/or purification away from homodimers.

[0203] There are a number of suitable pairs of sets of heterodimerization skew variants. These variants come in “pairs” of “sets”. That is, one set of the pair is incorporated into the first monomer and the other set of the pair is incorporated into the second monomer. It should be noted that these sets do not necessarily behave as “knobs in holes” variants, with a one-to-one correspondence between a residue on one monomer and a residue on the other; that is, these pairs of sets form an interface between the two monomers that encourages heterodimer formation and discourages homodimer formation, allowing the percentage of heterodimers that spontaneously form under biological conditions to be over 90%, rather than the expected 50% (25% homodimer A/A:50% heterodimer A/B:25% homodimer B/B).

### Steric Variants

[0204] In some embodiments, the formation of heterodimers can be facilitated by the addition of steric variants. That is, by changing amino acids in each heavy chain, different heavy chains are more likely to associate to form the heterodimeric structure than to form homodimers with the same Fc amino acid sequences. Suitable steric variants are included in FIG. 29.

[0205] One mechanism is generally referred to in the art as “knobs and holes”, referring to amino acid engineering that creates steric influences to favor heterodimeric formation and disfavor homodimeric formation can also optionally be used; this is sometimes referred to as “knobs and holes”, as described in U.S. Ser. No. 61/596,846, Ridgway et al., Protein Engineering 9(7):617 (1996); Atwell et al., J. Mol. Biol. 1997 270:26; U.S. Pat. No. 8,216,805, all of which are hereby incorporated by reference in their entirety. The Figures identify a number of “monomer A-monomer B” pairs that rely on “knobs and holes”. In addition, as described in Merchant et al., Nature Biotech. 16:677 (1998), these “knobs and hole” mutations can be combined with disulfide bonds to skew formation to heterodimerization.

[0206] An additional mechanism that finds use in the generation of heterodimers is sometimes referred to as “electrostatic steering” as described in Gunasekaran et al., J. Biol. Chem. 285(25):19637 (2010), hereby incorporated by reference in its entirety. This is sometimes referred to herein as “charge pairs”. In this embodiment, electrostatics are used to skew the formation towards heterodimerization. As those in the art will appreciate, these may also have an effect on pI, and thus on purification, and thus could in some cases also be considered pI variants. However, as these were generated to force heterodimerization and were not used as purification tools, they are classified as “steric variants”. These include, but are not limited to, D221E/P228E/L368E paired with D221R/P228R/K409R (e.g. these are “monomer corresponding sets) and C220E/P228E/368E paired with C220R/E224R/P228R/K409R.

[0207] Additional monomer A and monomer B variants that can be combined with other variants, optionally and independently in any amount, such as pI variants outlined herein or other steric variants that are shown in FIG. 37 of US 2012/0149876, the figure and legend and SEQ ID NOs of which are incorporated expressly by reference herein.

[0208] In some embodiments, the steric variants outlined herein can be optionally and independently incorporated with any pI variant (or other variants such as Fc variants, FcRn variants, etc.) into one or both monomers, and can be independently and optionally included or excluded from the proteins of the invention.

[0209] A list of suitable skew variants is found in FIG. 29, with FIG. 34 showing some pairs of particular utility in many embodiments. Of particular use in many embodiments are the pairs of sets including, but not limited to, S364K/E357Q: L368D/K370S; L368D/K370S: S364K; L368E/K370S: S364K; T411T/E360E/Q362E: D401K; L368D/K370S: S364K/E357L and K370S: S364K/E357Q. In terms of nomenclature, the pair “S364K/E357Q: L368D/K370S” means that one of the monomers has the double variant set S364K/E357Q and the other has the double variant set L368D/K370S.

### pI (Isoelectric Point) Variants for Heterodimers

[0210] In general, as will be appreciated by those in the art, there are two general categories of pI variants: those that increase the pI of the protein (basic changes) and those that decrease the pI of the protein (acidic changes). As described herein, all combinations of these variants can be done: one monomer may be wild type, or a variant that does not display a significantly different pI from wild-type, and the other can be either more basic or more acidic. Alternatively, each monomer is changed, one to more basic and one to more acidic.

[0211] Preferred combinations of pI variants are shown in FIG. 30. As outlined herein and shown in the figures, these changes are shown relative to IgG1, but all isotypes can be altered this way, as well as isotype hybrids. In the case where the heavy chain constant domain is from IgG2-4, R133E and R133Q can also be used.

[0212] In one embodiment, for example in the bottle opener format, a preferred combination of pI variants has one monomer (the negative Fab side) comprising 208D/295E/384D/418E/421D variants (N208D/Q295E/N384D/Q418E/N421D when relative to human IgG1) and a second monomer (the positive scFv side) comprising a positively charged scFv linker, including (GKPGS)4. However, as will be appreciated by those in the art, the first monomer includes a CH1 domain, including position 208. Accordingly, in constructs that do not include a CH1 domain (for example for heterodimeric Fc fusion proteins that do not utilize a CH1 domain on one of the domains, for example in a dual scFv format), a preferred negative pI variant Fc set includes 295E/384D/418E/421D variants (Q295E/N384D/Q418E/N421D when relative to human IgG1).

Antibody Heterodimers Light chain variants

[0213] In the case of antibody based heterodimers, e.g. where at least one of the monomers comprises a light chain in addition to the heavy chain domain, pI variants can also be made in the light chain. Amino acid substitutions for lowering the pI of the light chain include, but are not limited to, K126E, K126Q, K145E, K145Q, N152D, S156E, K169E, S202E, K207E and adding peptide DEDE at the c-terminus of the light chain. Changes in this category based on the constant lambda light chain include one or more substitutions at R108Q, Q124E, K126Q, N138D, K145T and Q199E. In addition, increasing the pI of the light chains can also be done.

### Isotypic Variants

[0214] In addition, many embodiments of the invention rely on the “importation” of pI amino acids at particular positions from one IgG isotype into another, thus reducing or eliminating the possibility of unwanted immunogenicity being introduced into the variants. A number of these are shown in FIG. 21 of US Publ. 2014/0370013, hereby incorporated by reference. That is, IgG1 is a common isotype for therapeutic antibodies for a variety of reasons, including high effector function. However, the heavy constant region of IgG1 has a higher pI than that of IgG2 (8.10 versus 7.31). By introducing IgG2 residues at particular positions into the IgG1 backbone, the pI of the resulting monomer is lowered (or increased) and additionally exhibits longer serum half-life. For example, IgG1 has a glycine (pI 5.97) at position 137, and IgG2 has a glutamic acid (pI 3.22); importing the glutamic acid will affect the pI of the resulting protein. As is described below, a number of amino acid substitutions are generally required to significant affect the pI of the variant antibody. However, it should be noted as discussed below that even changes in IgG2 molecules allow for increased serum half-life.

[0215] In other embodiments, non-isotypic amino acid changes are made, either to reduce the overall charge state of the resulting protein (e.g. by changing a higher pI amino acid to a lower pI amino acid), or to allow accommodations in structure for stability, etc. as is more further described below.

[0216] In addition, by pI engineering both the heavy and light constant domains, significant changes in each monomer of the heterodimer can be seen. As discussed herein, having the pIs of the two monomers differ by at least 0.5 can allow separation by ion exchange chromatography or isoelectric focusing, or other methods sensitive to isoelectric point.

### Calculating pI

[0217] The pI of each monomer can depend on the pI of the variant heavy chain constant domain and the pI of the total monomer, including the variant heavy chain constant domain and the fusion partner. Thus, in some embodiments, the change in pI is calculated on the basis of the variant heavy chain constant domain, using the chart in the FIG. 19 of US Pub. 2014/0370013. As discussed herein, which monomer to engineer is generally decided by the inherent pI of the Fv and scaffold regions. Alternatively, the pI of each monomer can be compared.

pI Variants that Also Confer Better FcRn In Vivo Binding

[0218] In the case where the pI variant decreases the pI of the monomer, they can have the added benefit of improving serum retention in vivo.

[0219] Although still under examination, Fc regions are believed to have longer half-lives in vivo, because binding to FcRn at pH 6 in an endosome sequesters the Fc (Ghetie and Ward, 1997 Immunol Today. 18(12): 592-598, entirely incorporated by reference). The endosomal compartment then recycles the Fc to the cell surface. Once the compartment opens to the extracellular space, the higher pH, ˜7.4, induces the release of Fc back into the blood. In mice, Dall'Acqua et al. showed that Fc mutants with increased FcRn binding at pH 6 and pH 7.4 actually had reduced serum concentrations and the same half life as wild-type Fc (Dall'Acqua et al. 2002, J. Immunol. 169:5171-5180, entirely incorporated by reference). The increased affinity of Fc for FcRn at pH 7.4 is thought to forbid the release of the Fc back into the blood. Therefore, the Fc mutations that will increase Fc's half-life in vivo will ideally increase FcRn binding at the lower pH while still allowing release of Fc at higher pH. The amino acid histidine changes its charge state in the pH range of 6.0 to 7.4. Therefore, it is not surprising to find His residues at important positions in the Fc/FcRn complex.

[0220] Recently it has been suggested that antibodies with variable regions that have lower isoelectric points may also have longer serum half-lives (Igawa et al., 2010 PEDS. 23(5): 385-392, entirely incorporated by reference). However, the mechanism of this is still poorly understood. Moreover, variable regions differ from antibody to antibody. Constant region variants with reduced pI and extended half-life would provide a more modular approach to improving the pharmacokinetic properties of antibodies, as described herein.

### Additional Fc Variants for Additional Functionality

[0221] In addition to pI amino acid variants, there are a number of useful Fc amino acid modification that can be made for a variety of reasons, including, but not limited to, altering binding to one or more FcγR receptors, altered binding to FcRn receptors, etc.

[0222] Accordingly, the proteins of the invention can include amino acid modifications, including the heterodimerization variants outlined herein, which includes the pI variants and steric variants. Each set of variants can be independently and optionally included or excluded from any particular heterodimeric protein.

### FcγR Variants

[0223] Accordingly, there are a number of useful Fc substitutions that can be made to alter binding to one or more of the FcγR receptors. Substitutions that result in increased binding as well as decreased binding can be useful. For example, it is known that increased binding to FcγRIIIa generally results in increased ADCC (antibody dependent cell-mediated cytotoxicity; the cell-mediated reaction wherein nonspecific cytotoxic cells that express FcγRs recognize bound antibody on a target cell and subsequently cause lysis of the target cell). Similarly, decreased binding to FcγRIIb (an inhibitory receptor) can be beneficial as well in some circumstances. Amino acid substitutions that find use in the present invention include those listed in U.S. Ser. No. 11/124,620 (particularly FIG. 41), Ser. Nos. 11/174,287, 11/396,495, 11/538,406, all of which are expressly incorporated herein by reference in their entirety and specifically for the variants disclosed therein. Particular variants that find use include, but are not limited to, 236A, 239D, 239E, 332E, 332D, 239D/332E, 267D, 267E, 328F, 267E/328F, 236A/332E, 239D/332E/330Y, 239D, 332E/330L, 243A, 243L, 264A, 264V and 299T.

[0224] In addition, there are additional Fc substitutions that find use in increased binding to the FcRn receptor and increased serum half life, as specifically disclosed in U.S. Ser. No. 12/341,769, hereby incorporated by reference in its entirety, including, but not limited to, 434S, 434A, 428L, 308F, 2591, 428L/434S, 2591/308F, 4361/428L, 4361 or V/434S, 436V/428L and 2591/308F/428L.

### Ablation Variants

[0225] Similarly, another category of functional variants are “FcγR ablation variants” or “Fc knock out (FcKO or KO)” variants. In these embodiments, for some therapeutic applications, it is desirable to reduce or remove the normal binding of the Fc domain to one or more or all of the Fcγ receptors (e.g. FcγR1, FcγRIIa, FcγRIIb, FcγRIIIa, etc.) to avoid additional mechanisms of action. That is, for example, in many embodiments, particularly in the use of bispecific antibodies that bind CD3 monovalently it is generally desirable to ablate FcγRIIIa binding to eliminate or significantly reduce ADCC activity. wherein one of the Fc domains comprises one or more Fcγ receptor ablation variants. These ablation variants are depicted in FIG. 31, and each can be independently and optionally included or excluded, with preferred aspects utilizing ablation variants selected from the group consisting of G236R/L328R, E233P/L234V/L235A/G236del/S239K, E233P/L234V/L235A/G236del/S267K, E233P/L234V/L235A/G236del/S239K/A327G, E233P/L234V/L235A/G236del/S267K/A327G and E233P/L234V/L235A/G236del. It should be noted that the ablation variants referenced herein ablate FcγR binding but generally not FcRn binding.

### Combination of Heterodimeric and Fc Variants

[0226] As will be appreciated by those in the art, all of the recited heterodimerization variants (including skew and/or pI variants) can be optionally and independently combined in any way, as long as they retain their “strandedness” or “monomer partition”. In addition, all of these variants can be combined into any of the heterodimerization formats.

[0227] In the case of pI variants, while embodiments finding particular use are shown in the Figures, other combinations can be generated, following the basic rule of altering the pI difference between two monomers to facilitate purification.

[0228] In addition, any of the heterodimerization variants, skew and pI, are also independently and optionally combined with Fc ablation variants, Fc variants, FcRn variants, as generally outlined herein.

### Useful Formats of the Invention

[0229] As will be appreciated by those in the art and discussed more fully below, the heterodimeric fusion proteins of the present invention can take on a wide variety of configurations, as are generally depicted in FIG. 1. Some figures depict “single ended” configurations, where there is one type of specificity on one “arm” of the molecule and a different specificity on the other “arm”. Other figures depict “dual ended” configurations, where there is at least one type of specificity at the “top” of the molecule and one or more different specificities at the “bottom” of the molecule. Thus, the present invention is directed to novel immunoglobulin compositions that co-engage a different first and a second antigen.

[0230] As will be appreciated by those in the art, the heterodimeric formats of the invention can have different valencies as well as be bispecific. That is, heterodimeric antibodies of the invention can be bivalent and bispecific, wherein CD3 is bound by one binding domain and CD38 is bound by a second binding domain. The heterodimeric antibodies can also be trivalent and bispecific, wherein the CD38 is bound by two binding domains and the CD3 by a second binding domain. As is outlined herein, it is preferable that the CD3 is bound only monovalently, to reduce potential side effects.

[0231] The present invention utilizes anti-CD3 antigen binding domains and anti-CD38 antigen binding domains. As will be appreciated by those in the art, any collection of anti-CD3 CDRs, anti-CD3 variable light and variable heavy domains, Fabs and scFvs as depicted in any of the Figures (see particularly FIGS. 2 through 7, and FIG. 68) can be used. Similarly, any of the anti-CD38 antigen binding domains, whether anti-CD38 CDRs, anti-CD38 variable light and variable heavy domains, Fabs and scFvs as depicted in any of the Figures (see FIGS. 8, 9 and 10) can be used, optionally and independently combined in any combination.

### Bottle Opener Format

[0232] One heterodimeric scaffold that finds particular use in the present invention is the “triple F” or “bottle opener” scaffold format as shown in FIGS. 1A, A and B. In this embodiment, one heavy chain of the antibody contains an single chain Fv (“scFv”, as defined below) and the other heavy chain is a “regular” FAb format, comprising a variable heavy chain and a light chain. This structure is sometimes referred to herein as “triple F” format (scFv-FAb-Fc) or the “bottle-opener” format, due to a rough visual similarity to a bottle-opener (see FIG. 1). The two chains are brought together by the use of amino acid variants in the constant regions (e.g. the Fc domain, the CH1 domain and/or the hinge region) that promote the formation of heterodimeric antibodies as is described more fully below.

[0233] There are several distinct advantages to the present “triple F” format. As is known in the art, antibody analogs relying on two scFv constructs often have stability and aggregation problems, which can be alleviated in the present invention by the addition of a “regular” heavy and light chain pairing. In addition, as opposed to formats that rely on two heavy chains and two light chains, there is no issue with the incorrect pairing of heavy and light chains (e.g. heavy 1 pairing with light 2, etc.).

[0234] Many of the embodiments outlined herein rely in general on the bottle opener format that comprises a first monomer comprising an scFv, comprising a variable heavy and a variable light domain, covalently attached using an scFv linker (charged, in many instances), where the scFv is covalently attached to the N-terminus of a first Fc domain usually through a domain linker (which, as outlined herein can either be un-charged or charged). The second monomer of the bottle opener format is a heavy chain, and the composition further comprises a light chain.

[0235] In general, in many preferred embodiments, the scFv is the domain that binds to the CD3, with the Fab of the heavy and light chains binding to CD38. In addition, the Fc domains of the invention generally comprise skew variants (e.g. a set of amino acid substitutions as shown in FIG. 29 and FIG. 34, with particularly useful skew variants being selected from the group consisting of S364K/E357Q: L368D/K370S; L368D/K370S: S364K; L368E/K370S: S364K; T411T/E360E/Q362E: D401K; L368D/K370S: S364K/E357L and K370S: S364K/E357Q), optionally ablation variants, and the heavy chain comprises pI variants.

[0236] The present invention provides bottle opener formats where the anti-CD3 scFv sequences are as shown in FIGS. 2 to 7 and FIG. 68.

[0237] The present invention provides bottle opener formats wherein the anti-CD38 sequences are as shown in FIGS. 8 to 10.

mAb-Fv Format

[0238] One heterodimeric scaffold that finds particular use in the present invention is the mAb-Fv format shown in FIG. 1. In this embodiment, the format relies on the use of a C-terminal attachment of an “extra” variable heavy domain to one monomer and the C-terminal attachment of an “extra” variable light domain to the other monomer, thus forming a third antigen binding domain, wherein the Fab portions of the two monomers bind CD38 and the “extra” scFv domain binds CD3.

[0239] In this embodiment, the first monomer comprises a first heavy chain, comprising a first variable heavy domain and a first constant heavy domain comprising a first Fc domain, with a first variable light domain covalently attached to the C-terminus of the first Fc domain using a domain linker (vh1-CH1-hinge-CH2-CH3-[optional linker]-v12). The second monomer comprises a second variable heavy domain of the second constant heavy domain comprising a second Fc domain, and a third variable heavy domain covalently attached to the C-terminus of the second Fc domain using a domain linker linker (vj1-CH1-hinge-CH2-CH3-[optional linker]-vh2. The two C-terminally attached variable domains make up a scFv that binds CD3. This embodiment further utilizes a common light chain comprising a variable light domain and a constant light domain, that associates with the heavy chains to form two identical Fabs that bind CD38. As for many of the embodiments herein, these constructs include skew variants, pI variants, ablation variants, additional Fc variants, etc. as desired and described herein.

[0240] The present invention provides mAb-Fv formats where the anti-CD3 scFv sequences are as shown in FIGS. 2 to 7.

[0241] The present invention provides mAb-Fv formats wherein the anti-CD38 sequences are as shown in FIGS. 8 to 10.

[0242] The present invention provides mAb-Fv formats comprising ablation variants as shown in FIG. 31.

[0243] The present invention provides mAb-Fv formats comprising skew variants as shown in FIGS. 29 and 34.

mAb-scFv

[0244] One heterodimeric scaffold that finds particular use in the present invention is the mAb-Fv format shown in FIG. 1. In this embodiment, the format relies on the use of a C-terminal attachment of a scFv to one of the monomers, thus forming a third antigen binding domain, wherein the Fab portions of the two monomers bind CD38 and the “extra” scFv domain binds CD3. Thus, the first monomer comprises a first heavy chain (comprising a variable heavy domain and a constant domain), with a C-terminally covalently attached scFv comprising a scFv variable light domain, an scFv linker and a scFv variable heavy domain in either orientation (vh1-CH1-hinge-CH2-CH3-[optional linker]-vh2-scFv linker-v12 or vh1-CH1-hinge-CH2-CH3-[optional linker]-v12-scFv linker-vh2). This embodiment further utilizes a common light chain comprising a variable light domain and a constant light domain, that associates with the heavy chains to form two identical Fabs that bind CD38. As for many of the embodiments herein, these constructs include skew variants, pI variants, ablation variants, additional Fc variants, etc. as desired and described herein.

[0245] The present invention provides mAb-scFv formats where the anti-CD3 scFv sequences are as shown in FIGS. 2 to 7.

[0246] The present invention provides mAb-scFv formats wherein the anti-CD38 sequences are as shown in FIGS. 8 to 10.

[0247] The present invention provides mAb-scFv formats comprising ablation variants as shown in FIG. 31.

[0248] The present invention provides mAb-scFv formats comprising skew variants as shown in FIGS. 29 and 34.

Central scFv

[0249] One heterodimeric scaffold that finds particular use in the present invention is the Central-scFv format shown in FIG. 1. In this embodiment, the format relies on the use of an inserted scFv domain thus forming a third antigen binding domain, wherein the Fab portions of the two monomers bind CD38 and the “extra” scFv domain binds CD3. The scFv domain is inserted between the Fc domain and the CH1-Fv region of one of the monomers, thus providing a third antigen binding domain.

[0250] In this embodiment, one monomer comprises a first heavy chain comprising a first variable heavy domain, a CH1 domain (and optional hinge) and Fc domain, with a scFv comprising a scFv variable light domain, an scFv linker and a scFv variable heavy domain. The scFv is covalently attached between the C-terminus of the CH1 domain of the heavy constant domain and the N-terminus of the first Fc domain using optional domain linkers (vh1-CH1-[optional linker]-vh2-scFv linker-v12-[optional linker including the hinge]-CH2-CH3, or the opposite orientation for the scFv, vh1-CH1-[optional linker]-v12-scFv linker-vh2-[optional linker including the hinge]-CH2-CH3). The other monomer is a standard Fab side. This embodiment further utilizes a common light chain comprising a variable light domain and a constant light domain, that associates with the heavy chains to form two identical Fabs that bind CD38. As for many of the embodiments herein, these constructs include skew variants, pI variants, ablation variants, additional Fc variants, etc. as desired and described herein.

[0251] The present invention provides Central-scFv formats where the anti-CD3 scFv sequences are as shown in FIGS. 2 to 7.

[0252] The present invention provides Central-scFv formats wherein the anti-CD38 sequences are as shown in FIGS. 8 to 10.

[0253] The present invention provides Central-scFv formats comprising ablation variants as shown in FIG. 31.

[0254] The present invention provides Central-scFv formats comprising skew variants as shown in FIGS. 29 and 34.

### Central-Fv Format

[0255] One heterodimeric scaffold that finds particular use in the present invention is the Central-Fv format shown in FIG. 1. In this embodiment, the format relies on the use of an inserted scFv domain thus forming a third antigen binding domain, wherein the Fab portions of the two monomers bind CD38 and the “extra” scFv domain binds CD3. The scFv domain is inserted between the Fc domain and the CH1-Fv region of the monomers, thus providing a third antigen binding domain, wherein each monomer contains a component of the scFv (e.g. one monomer comprises a variable heavy domain and the other a variable light domain).

[0256] In this embodiment, one monomer comprises a first heavy chain comprising a first variable heavy domain, a CH1 domain and Fc domain and an additional variable light domain. The light domain is covalently attached between the C-terminus of the CH1 domain of the heavy constant domain and the N-terminus of the first Fc domain using domain linkers (vh1-CH1-[optional linker]v12-hinge-CH2-CH3). The other monomer comprises a first heavy chain comprising a first variable heavy domain, a CH1 domain and Fc domain and an additional variable heavy domain (vh1-CH1-[optional linker]-vh2-hinge-CH2-CH3). The light domain is covalently attached between the C-terminus of the CH1 domain of the heavy constant domain and the N-terminus of the first Fc domain using domain linkers.

[0257] This embodiment further utilizes a common light chain comprising a variable light domain and a constant light domain, that associates with the heavy chains to form two identical Fabs that bind CD38. As for many of the embodiments herein, these constructs include skew variants, pI variants, ablation variants, additional Fc variants, etc. as desired and described herein.

[0258] The present invention provides Central-scFv formats where the anti-CD3 scFv sequences are as shown in FIGS. 2 to 7.

[0259] The present invention provides Central-scFv formats wherein the anti-CD38 sequences are as shown in FIGS. 8 to 10.

[0260] The present invention provides Central-scFv formats comprising ablation variants as shown in FIG. 31.

[0261] The present invention provides Central-scFv formats comprising skew variants as shown in FIGS. 29 and 34.

### One Armed Central-scFv

[0262] One heterodimeric scaffold that finds particular use in the present invention is the one armed central-scFv format shown in FIG. 1. In this embodiment, one monomer comprises just an Fc domain, while the other monomer uses an inserted scFv domain thus forming the second antigen binding domain. In this format, either the Fab portion binds CD38 and the scFv binds CD3 or vice versa. The scFv domain is inserted between the Fc domain and the CH1-Fv region of one of the monomers.

[0263] In this embodiment, one monomer comprises a first heavy chain comprising a first variable heavy domain, a CH1 domain and Fc domain, with a scFv comprising a scFv variable light domain, an scFv linker and a scFv variable heavy domain. The scFv is covalently attached between the C-terminus of the CH1 domain of the heavy constant domain and the N-terminus of the first Fc domain using domain linkers. The second monomer comprises an Fc domain. This embodiment further utilizes a light chain comprising a variable light domain and a constant light domain, that associates with the heavy chain to form a Fab. As for many of the embodiments herein, these constructs include skew variants, pI variants, ablation variants, additional Fc variants, etc. as desired and described herein.

[0264] The present invention provides one armed Central-scFv formats where the anti-CD3 scFv sequences are as shown in FIGS. 2 to 7.

[0265] The present invention provides one armed Central-scFv formats wherein the anti-CD38 sequences are as shown in FIGS. 8 to 10.

[0266] The present invention provides one armed Central-scFv formats comprising ablation variants as shown in FIG. 31.

[0267] The present invention provides one armed Central-scFv formats comprising skew variants as shown in FIGS. 29 and 34.

Dual scFv Formats

[0268] The present invention also provides dual scFv formats as are known in the art and shown in FIG. 1. In particular, the invention provides dual scFv formats where the anti-CD3 scFv sequences are as shown in FIGS. 2 to 7.

[0269] The present invention provides dual scFv formats wherein the anti-CD38 sequences are as shown in FIGS. 8 to 10.

[0270] The present invention provides dual scFv formats comprising pI variants and/or charged scFv linkers (in general, either one monomer comprises Q295E/N384D/Q418E/N481D and the other a positively charged scFv linker, or they both comprise oppositely charged scFv linkers).

### Nucleic Acids of the Invention

[0271] The invention further provides nucleic acid compositions encoding the bispecific antibodies of the invention. As will be appreciated by those in the art, the nucleic acid compositions will depend on the format and scaffold of the heterodimeric protein. Thus, for example, when the format requires three amino acid sequences, such as for the triple F format (e.g. a first amino acid monomer comprising an Fc domain and a scFv, a second amino acid monomer comprising a heavy chain and a light chain), three nucleic acid sequences can be incorporated into one or more expression vectors for expression. Similarly, some formats (e.g. dual scFv formats such as disclosed in FIG. 1) only two nucleic acids are needed; again, they can be put into one or two expression vectors.

[0272] As is known in the art, the nucleic acids encoding the components of the invention can be incorporated into expression vectors as is known in the art, and depending on the host cells used to produce the heterodimeric antibodies of the invention. Generally the nucleic acids are operably linked to any number of regulatory elements (promoters, origin of replication, selectable markers, ribosomal binding sites, inducers, etc.). The expression vectors can be extra-chromosomal or integrating vectors.

[0273] The nucleic acids and/or expression vectors of the invention are then transformed into any number of different types of host cells as is well known in the art, including mammalian, bacterial, yeast, insect and/or fungal cells, with mammalian cells (e.g. CHO cells), finding use in many embodiments.

[0274] In some embodiments, nucleic acids encoding each monomer and the optional nucleic acid encoding a light chain, as applicable depending on the format, are each contained within a single expression vector, generally under different or the same promoter controls. In embodiments of particular use in the present invention, each of these two or three nucleic acids are contained on a different expression vector. As shown herein and in 62/025,931, hereby incorporated by reference, different vector ratios can be used to drive heterodimer formation. That is, surprisingly, while the proteins comprise first monomer:second monomer:light chains (in the case of many of the embodiments herein that have three polypeptides comprising the heterodimeric antibody) in a 1:1:2 ratio, these are not the ratios that give the best results. See FIG. 65.

[0275] The heterodimeric antibodies of the invention are made by culturing host cells comprising the expression vector(s) as is well known in the art. Once produced, traditional antibody purification steps are done, including an ion exchange chromotography step. As discussed herein, having the pIs of the two monomers differ by at least 0.5 can allow separation by ion exchange chromatography or isoelectric focusing, or other methods sensitive to isoelectric point. That is, the inclusion of pI substitutions that alter the isoelectric point (pI) of each monomer so that such that each monomer has a different pI and the heterodimer also has a distinct pI, thus facilitating isoelectric purification of the “triple F” heterodimer (e.g., anionic exchange columns, cationic exchange columns). These substitutions also aid in the determination and monitoring of any contaminating dual scFv-Fc and mAb homodimers post-purification (e.g., IEF gels, cIEF, and analytical IEX columns).

### Treatments

[0276] Once made, the compositions of the invention find use in a number of applications. CD38 is unregulated in many hematopoeitic malignancies and in cell lines derived from various hematopoietic malignancies including non-Hodgkin's lymphoma (NHL), Burkitt's lymphoma (BL), multiple myeloma (MM), B chronic lymphocytic leukemia (B-CLL), B and T acute lymphocytic leukemia (ALL), T cell lymphoma (TCL), acute myeloid leukemia (AML), hairy cell leukemia (HCL), Hodgkin's Lymphoma (HL), chronic lymphocytic leukemia (CLL) and chronic myeloid leukemia (CML).

[0277] Accordingly, the heterodimeric compositions of the invention find use in the treatment of these cancers.

### Antibody Compositions for In Vivo Administration

[0278] Formulations of the antibodies used in accordance with the present invention are prepared for storage by mixing an antibody having the desired degree of purity with optional pharmaceutically acceptable carriers, excipients or stabilizers (Remington's Pharmaceutical Sciences 16th edition, Osol, A. Ed. [1980]), in the form of lyophilized formulations or aqueous solutions. Acceptable carriers, excipients, or stabilizers are nontoxic to recipients at the dosages and concentrations employed, and include buffers such as phosphate, citrate, and other organic acids; antioxidants including ascorbic acid and methionine; preservatives (such as octadecyldimethylbenzyl ammonium chloride; hexamethonium chloride; benzalkonium chloride, benzethonium chloride; phenol, butyl or benzyl alcohol; alkyl parabens such as methyl or propyl paraben; catechol; resorcinol; cyclohexanol; 3-pentanol; and m-cresol); low molecular weight (less than about 10 residues) polypeptides; proteins, such as serum albumin, gelatin, or immunoglobulins; hydrophilic polymers such as polyvinylpyrrolidone; amino acids such as glycine, glutamine, asparagine, histidine, arginine, or lysine; monosaccharides, disaccharides, and other carbohydrates including glucose, mannose, or dextrins; chelating agents such as EDTA; sugars such as sucrose, mannitol, trehalose or sorbitol; salt-forming counter-ions such as sodium; metal complexes (e.g. Zn-protein complexes); and/or non-ionic surfactants such as TWEEN™, PLURONICS™ or polyethylene glycol (PEG).

[0279] The formulation herein may also contain more than one active compound as necessary for the particular indication being treated, preferably those with complementary activities that do not adversely affect each other. For example, it may be desirable to provide antibodies with other specificities. Alternatively, or in addition, the composition may comprise a cytotoxic agent, cytokine, growth inhibitory agent and/or small molecule antagonist. Such molecules are suitably present in combination in amounts that are effective for the purpose intended.

[0280] The active ingredients may also be entrapped in microcapsules prepared, for example, by coacervation techniques or by interfacial polymerization, for example, hydroxymethylcellulose or gelatin-microcapsules and poly-(methylmethacylate) microcapsules, respectively, in colloidal drug delivery systems (for example, liposomes, albumin microspheres, microemulsions, nano-particles and nanocapsules) or in macroemulsions. Such techniques are disclosed in Remington's Pharmaceutical Sciences 16th edition, Osol, A. Ed. (1980).

[0281] The formulations to be used for in vivo administration should be sterile, or nearly so. This is readily accomplished by filtration through sterile filtration membranes.

[0282] Sustained-release preparations may be prepared. Suitable examples of sustained-release preparations include semipermeable matrices of solid hydrophobic polymers containing the antibody, which matrices are in the form of shaped articles, e.g. films, or microcapsules. Examples of sustained-release matrices include polyesters, hydrogels (for example, poly(2-hydroxyethyl-methacrylate), or poly(vinylalcohol)), polylactides (U.S. Pat. No. 3,773,919), copolymers of L-glutamic acid and .gamma. ethyl-L-glutamate, non-degradable ethylene-vinyl acetate, degradable lactic acid-glycolic acid copolymers such as the LUPRON DEPOT™ (injectable microspheres composed of lactic acid-glycolic acid copolymer and leuprolide acetate), and poly-D-(−)-3-hydroxybutyric acid. While polymers such as ethylene-vinyl acetate and lactic acid-glycolic acid enable release of molecules for over 100 days, certain hydrogels release proteins for shorter time periods.

[0283] When encapsulated antibodies remain in the body for a long time, they may denature or aggregate as a result of exposure to moisture at 37° C., resulting in a loss of biological activity and possible changes in immunogenicity. Rational strategies can be devised for stabilization depending on the mechanism involved. For example, if the aggregation mechanism is discovered to be intermolecular S—S bond formation through thio-disulfide interchange, stabilization may be achieved by modifying sulfhydryl residues, lyophilizing from acidic solutions, controlling moisture content, using appropriate additives, and developing specific polymer matrix compositions.

### Administrative Modalities

[0284] The antibodies and chemotherapeutic agents of the invention are administered to a subject, in accord with known methods, such as intravenous administration as a bolus or by continuous infusion over a period of time, by intramuscular, intraperitoneal, intracerobrospinal, subcutaneous, intra-articular, intrasynovial, intrathecal, oral, topical, or inhalation routes. Intravenous or subcutaneous administration of the antibody is preferred.

### Treatment Modalities

[0285] In the methods of the invention, therapy is used to provide a positive therapeutic response with respect to a disease or condition. By “positive therapeutic response” is intended an improvement in the disease or condition, and/or an improvement in the symptoms associated with the disease or condition. For example, a positive therapeutic response would refer to one or more of the following improvements in the disease: (1) a reduction in the number of neoplastic cells; (2) an increase in neoplastic cell death; (3) inhibition of neoplastic cell survival; (5) inhibition (i.e., slowing to some extent, preferably halting) of tumor growth; (6) an increased patient survival rate; and (7) some relief from one or more symptoms associated with the disease or condition.

[0286] Positive therapeutic responses in any given disease or condition can be determined by standardized response criteria specific to that disease or condition. Tumor response can be assessed for changes in tumor morphology (i.e., overall tumor burden, tumor size, and the like) using screening techniques such as magnetic resonance imaging (MRI) scan, x-radiographic imaging, computed tomographic (CT) scan, bone scan imaging, endoscopy, and tumor biopsy sampling including bone marrow aspiration (BMA) and counting of tumor cells in the circulation.

[0287] In addition to these positive therapeutic responses, the subject undergoing therapy may experience the beneficial effect of an improvement in the symptoms associated with the disease.

[0288] An improvement in the disease may be characterized as a complete response. By “complete response” is intended an absence of clinically detectable disease with normalization of any previously abnormal radiographic studies, bone marrow, and cerebrospinal fluid (CSF) or abnormal monoclonal protein in the case of myeloma.

[0289] Such a response may persist for at least 4 to 8 weeks, or sometimes 6 to 8 weeks, following treatment according to the methods of the invention. Alternatively, an improvement in the disease may be categorized as being a partial response. By “partial response” is intended at least about a 50% decrease in all measurable tumor burden (i.e., the number of malignant cells present in the subject, or the measured bulk of tumor masses or the quantity of abnormal monoclonal protein) in the absence of new lesions, which may persist for 4 to 8 weeks, or 6 to 8 weeks.

[0290] Treatment according to the present invention includes a “therapeutically effective amount” of the medicaments used. A “therapeutically effective amount” refers to an amount effective, at dosages and for periods of time necessary, to achieve a desired therapeutic result.

[0291] A therapeutically effective amount may vary according to factors such as the disease state, age, sex, and weight of the individual, and the ability of the medicaments to elicit a desired response in the individual. A therapeutically effective amount is also one in which any toxic or detrimental effects of the antibody or antibody portion are outweighed by the therapeutically beneficial effects.

[0292] A “therapeutically effective amount” for tumor therapy may also be measured by its ability to stabilize the progression of disease. The ability of a compound to inhibit cancer may be evaluated in an animal model system predictive of efficacy in human tumors.

[0293] Alternatively, this property of a composition may be evaluated by examining the ability of the compound to inhibit cell growth or to induce apoptosis by in vitro assays known to the skilled practitioner. A therapeutically effective amount of a therapeutic compound may decrease tumor size, or otherwise ameliorate symptoms in a subject. One of ordinary skill in the art would be able to determine such amounts based on such factors as the subject's size, the severity of the subject's symptoms, and the particular composition or route of administration selected.

[0294] Dosage regimens are adjusted to provide the optimum desired response (e.g., a therapeutic response). For example, a single bolus may be administered, several divided doses may be administered over time or the dose may be proportionally reduced or increased as indicated by the exigencies of the therapeutic situation. Parenteral compositions may be formulated in dosage unit form for ease of administration and uniformity of dosage. Dosage unit form as used herein refers to physically discrete units suited as unitary dosages for the subjects to be treated; each unit contains a predetermined quantity of active compound calculated to produce the desired therapeutic effect in association with the required pharmaceutical carrier.

[0295] The specification for the dosage unit forms of the present invention are dictated by and directly dependent on (a) the unique characteristics of the active compound and the particular therapeutic effect to be achieved, and (b) the limitations inherent in the art of compounding such an active compound for the treatment of sensitivity in individuals.

[0296] The efficient dosages and the dosage regimens for the bispecific antibodies used in the present invention depend on the disease or condition to be treated and may be determined by the persons skilled in the art.

[0297] An exemplary, non-limiting range for a therapeutically effective amount of an bispecific antibody used in the present invention is about 0.1-100 mg/kg, such as about 0.1-50 mg/kg, for example about 0.1-20 mg/kg, such as about 0.1-10 mg/kg, for instance about 0.5, about such as 0.3, about 1, or about 3 mg/kg. In another embodiment, he antibody is administered in a dose of 1 mg/kg or more, such as a dose of from 1 to 20 mg/kg, e.g. a dose of from 5 to 20 mg/kg, e.g. a dose of 8 mg/kg.

[0298] A medical professional having ordinary skill in the art may readily determine and prescribe the effective amount of the pharmaceutical composition required. For example, a physician or a veterinarian could start doses of the medicament employed in the pharmaceutical composition at levels lower than that required in order to achieve the desired therapeutic effect and gradually increase the dosage until the desired effect is achieved.

[0299] In one embodiment, the bispecific antibody is administered by infusion in a weekly dosage of from 10 to 500 mg/kg such as of from 200 to 400 mg/kg Such administration may be repeated, e.g., 1 to 8 times, such as 3 to 5 times. The administration may be performed by continuous infusion over a period of from 2 to 24 hours, such as of from 2 to 12 hours.

[0300] In one embodiment, the bispecific antibody is administered by slow continuous infusion over a long period, such as more than 24 hours, if required to reduce side effects including toxicity.

[0301] In one embodiment the bispecific antibody is administered in a weekly dosage of from 250 mg to 2000 mg, such as for example 300 mg, 500 mg, 700 mg, 1000 mg, 1500 mg or 2000 mg, for up to 8 times, such as from 4 to 6 times. The administration may be performed by continuous infusion over a period of from 2 to 24 hours, such as of from 2 to 12 hours. Such regimen may be repeated one or more times as necessary, for example, after 6 months or 12 months. The dosage may be determined or adjusted by measuring the amount of compound of the present invention in the blood upon administration by for instance taking out a biological sample and using anti-idiotypic antibodies which target the antigen binding region of the bispecific antibody.

[0302] In a further embodiment, the bispecific antibody is administered once weekly for 2 to 12 weeks, such as for 3 to 10 weeks, such as for 4 to 8 weeks.

[0303] In one embodiment, the bispecific antibody is administered by maintenance therapy, such as, e.g., once a week for a period of 6 months or more.

[0304] In one embodiment, the bispecific antibody is administered by a regimen including one infusion of an bispecific antibody followed by an infusion of an bispecific antibody conjugated to a radioisotope. The regimen may be repeated, e.g., 7 to 9 days later.

[0305] As non-limiting examples, treatment according to the present invention may be provided as a daily dosage of an antibody in an amount of about 0.1-100 mg/kg, such as 0.5, 0.9, 1.0, 1.1, 1.5, 2, 3, 4, 5, 6, 7, 8, 9, 10, 11, 12, 13, 14, 15, 16, 17, 18, 19, 20, 21, 22, 23, 24, 25, 26, 27, 28, 29, 30, 40, 45, 50, 60, 70, 80, 90 or 100 mg/kg, per day, on at least one of day 1, 2, 3, 4, 5, 6, 7, 8, 9, 10, 11, 12, 13, 14, 15, 16, 17, 18, 19, 20, 21, 22, 23, 24, 25, 26, 27, 28, 29, 30, 31, 32, 33, 34, 35, 36, 37, 38, 39, or 40, or alternatively, at least one of week 1, 2, 3, 4, 5, 6, 7, 8, 9, 10, 11, 12, 13, 14, 15, 16, 17, 18, 19 or 20 after initiation of treatment, or any combination thereof, using single or divided doses of every 24, 12, 8, 6, 4, or 2 hours, or any combination thereof.

[0306] In some embodiments the bispecific antibody molecule thereof is used in combination with one or more additional therapeutic agents, e.g. a chemotherapeutic agent. Non-limiting examples of DNA damaging chemotherapeutic agents include topoisomerase I inhibitors (e.g., irinotecan, topotecan, camptothecin and analogs or metabolites thereof, and doxorubicin); topoisomerase II inhibitors (e.g., etoposide, teniposide, and daunorubicin); alkylating agents (e.g., melphalan, chlorambucil, busulfan, thiotepa, ifosfamide, carmustine, lomustine, semustine, streptozocin, decarbazine, methotrexate, mitomycin C, and cyclophosphamide); DNA intercalators (e.g., cisplatin, oxaliplatin, and carboplatin); DNA intercalators and free radical generators such as bleomycin; and nucleoside mimetics (e.g., 5-fluorouracil, capecitibine, gemcitabine, fludarabine, cytarabine, mercaptopurine, thioguanine, pentostatin, and hydroxyurea).

[0307] Chemotherapeutic agents that disrupt cell replication include: paclitaxel, docetaxel, and related analogs; vincristine, vinblastin, and related analogs; thalidomide, lenalidomide, and related analogs (e.g., CC-5013 and CC-4047); protein tyrosine kinase inhibitors (e.g., imatinib mesylate and gefitinib); proteasome inhibitors (e.g., bortezomib); NF-κB inhibitors, including inhibitors of IκB kinase; antibodies which bind to proteins overexpressed in cancers and thereby downregulate cell replication (e.g., trastuzumab, rituximab, cetuximab, and bevacizumab); and other inhibitors of proteins or enzymes known to be upregulated, over-expressed or activated in cancers, the inhibition of which downregulates cell replication.

[0308] In some embodiments, the antibodies of the invention can be used prior to, concurrent with, or after treatment with Velcade® (bortezomib).

[0309] All cited references are herein expressly incorporated by reference in their entirety.

[0310] Whereas particular embodiments of the invention have been described above for purposes of illustration, it will be appreciated by those skilled in the art that numerous variations of the details may be made without departing from the invention as described in the appended claims.

### EXAMPLES

[0311] Examples are provided below to illustrate the present invention. These examples are not meant to constrain the present invention to any particular application or theory of operation. For all constant region positions discussed in the present invention, numbering is according to the EU index as in Kabat (Kabat et al., 1991, Sequences of Proteins of Immunological Interest, 5th Ed., United States Public Health Service, National Institutes of Health, Bethesda, entirely incorporated by reference). Those skilled in the art of antibodies will appreciate that this convention consists of nonsequential numbering in specific regions of an immunoglobulin sequence, enabling a normalized reference to conserved positions in immunoglobulin families. Accordingly, the positions of any given immunoglobulin as defined by the EU index will not necessarily correspond to its sequential sequence.

[0312] General and specific scientific techniques are outlined in US Publications 2015/0307629, 2014/0288275 and WO2014/145806, all of which are expressly incorporated by reference in their entirety and particularly for the techniques outlined therein.

### Example 1: Alternate Formats

### Fab-scFv-Fc Production

[0313] DNA encoding the three chains needed for Fab-scFv-Fc expression—Fab-Fc, scFv-Fc, and LC—were generated by gene synthesis (Blue Heron Biotechnology, Bothell, Wash.) and were subcloned using standard molecular biology techniques into the expression vector pTT5. Substitutions were introduced using either site-directed mutagenesis (QuikChange, Stratagene, Cedar Creek, Tex.) or additional gene synthesis and subcloning. DNA was transfected into HEK293E cells for expression and resulting proteins were purified from the supernatant using protein A affinity (GE Healthcare) and cation exchange (GE Healthcare) chromatography. Amino acid sequences for Fab-scFv-Fc bispecifics are listed in FIG. 3.

### Surface Plasmon Resonance Affinity Determination

[0314] Surface plasmon resonance binding experiments were performed using a Biacore 3000 instrument (data not shown). Even after amino acids substitution(s) to modulate affinity, the anti-CD3 variable region remains cross-reactive for cynomolgus monkey CD3.

### Cell Surface Binding

[0315] Binding of Fab-scFv-Fcs to CD3 was measured on T cells via detection with a secondary antibody.

### Redirected T Cell Cytotoxicity

[0316] Anti-CD38 x anti-CD3 Fab-scFv-Fc bispecifics were characterized in vitro for redirected T cell cytotoxicity (RTCC) of the CD20⁺ Ramos Burkitt's lymphoma (BL) cell line, CD20⁺ Jeko-1 Mantle Cell Lymphoma (MCL) cell line, and the CD38⁺ RPMI 8266 myeloma cell line. RTCC was measured and IL-6 production during RTCC was also characterized (data not shown).

huPBL-SCID Immunoglobulin-Depletion Mouse Studies

[0317] The ability of anti-CD38 x anti-CD3 Fab-scFv-Fc bispecifics to deplete human immunoglobulins via depletion of human B cells or plasma cells was assessed using human PBMC engrafted SCID mice. Results are shown in the Figures.

### Example 2: Alternate Formats

### Bispecifics Production

[0318] Cartoon schematics of anti-CD38 x anti-CD3 bispecifics are shown in FIG. 1. Amino acid sequences for alternate format anti-CD38 x anti-CD3 bispecifics are listed in FIG. 39 to FIG. 43. DNA encoding the three chains needed for bispecific expression were generated by gene synthesis (Blue Heron Biotechnology, Bothell, Wash.) and were subcloned using standard molecular biology techniques into the expression vector pTT5. Substitutions were introduced using either site-directed mutagenesis (QuikChange, Stratagene, Cedar Creek, Tex.) or additional gene synthesis and subcloning. DNA was transfected into HEK293E cells for expression and resulting proteins were purified from the supernatant using protein A affinity (GE Healthcare) and cation exchange chromatography. Yields following protein A affinity purification are shown in FIG. 35. Cation exchange chromatography purification was performed using a HiTrap SP HP column (GE Healthcare) with a wash/equilibration buffer of 50 mM MES, pH 6.0 and an elution buffer of 50 mM MES, pH 6.0+1 M NaCl linear gradient (see FIG. 36 for chromatograms).

### Redirected T Cell Cytotoxicity

[0319] Anti-CD38 x anti-CD3 bispecifics were characterized in vitro for redirected T cell cytotoxicity (RTCC) of the CD38⁺ RPMI8266 myeloma cell line. 10k RPMI8266 cells were incubated for 24 h with 500k human PBMCs. RTCC was measured by LDH fluorescence as indicated (see FIG. 37).

### Example 3

### Redirected T Cell Cytotoxicity

[0320] Anti-CD38 x anti-CD3 Fab-scFv-Fc bispecifics were characterized in vitro for redirected T cell cytotoxicity (RTCC) of the CD38+ RPMI8266 myeloma cell line. 40k RPMI8266 cells were incubated for 96 h with 400k human PBMCs. RTCC was measured by flow cytometry as indicated (see FIG. 44). CD4+ and CD8+ T cell expression of CD69, Ki-67, and PI-9 were also characterized by flow cytometry and are shown in FIG. 45.

### Mouse Model of Anti-Tumor Activity

[0321] Four groups of five NOD scid gamma (NSG) mice each were engrafted with 5×10⁶ RPMI8226TrS tumor cells (multiple myeloma, luciferase-expressing) by intravenous tail vein injection on Day −23. On Day 0, mice were engrafted intraperitoneally with 10×10⁶ human PBMCs. After PBMC engraftment on Day 0, test articles are dosed weekly (Days 0, 7) by intraperitoneal injection at dose levels indicated in FIG. 4. Study design is further summarized in FIG. 46. Tumor growth was monitored by measuring total flux per mouse using an in vivo imaging system (IVIS®). Both XmAb13551 and XmAb15426 showed substantial anti-tumor effects (see FIG. 47 and FIG. 48).

### Studies in Cynomolgus Monkey

[0322] Cynomolgus monkeys were given a single dose of anti-CD38 x anti-CD3 bispecifics. An anti-RSV x anti-CD3 bispecific control was also included. Dose levels were: 20 μg/kg XmAb13551 (n=2), 0.5 mg/kg XmAb15426 (n=3), 3 mg/kg XmAb14702 (n=3), or 3 mg/kg XmAb13245 (anti-RSV x anti-CD3 control, n=3) (in 3 independent studies). Anti-CD38 x anti-CD3 bispecifics rapidly depleted CD38+ cells in peripheral blood (see FIG. 49). Anti-CD38 x anti-CD3 bispecifics resulted in T cell activation as measured by CD69 expression (see FIG. 50). Serum levels of IL-6 were also measured (see FIG. 51). Note that, compared to XmAb13551, XmAb15426 had an increased duration of CD38+ cell depletion and lower levels of T cell activation and IL-6 production.

[0323] XmAb15426 and XmAb14702 were tested at single doses of 0.5 mg/kg and 3 mg/kg respectively. Both antibodies were well-tolerated at these higher doses, consistent with the moderate levels of IL6 observed in serum from the treated monkeys. Moreover, XmAb15426, with intermediate CD3 affinity, more effectively depleted CD38+ cells at 0.5 mg/kg compared to the original high-affinity XmAb13551 dosed at 2, 5 or 20 μg/kg. Depletion by XmAb15426 was more sustained compared to the highest dose of XmAb13551 in the previous study (7 vs. 2 days, respectively). Notably, although target cell depletion was greater for XmAb15426, T cell activation (CD69, CD25 and PD1 induction) was much lower in monkeys treated with XmAb15426 even dosed 25-fold higher than the 20 μg/kg XmAb13551 group. XmAb14702, with very low CD3 affinity, had little effect on CD38+ cells and T cell activation.

[0324] These results demonstrate that modulating T cell activation by attenuating CD3 affinity is a promising method to improve the therapeutic window of T cell-engaging bispecific antibodies. This strategy has potential to expand the set of antigens amenable to targeted T cell immunotherapy by improving tolerability and enabling higher dosing to overcome antigen sink clearance with targets such as CD38. By reducing affinity for CD3, XmAb 15426 effectively depletes CD38+ cells while minimizing the CRS effects seen with comparable doses of its high-affinity counterpart XmAb13551.

### Example 4: Affinity of Anti-CD38 X Anti-CD3 Bispecific Antibodies for Human and Cynomolgus CD38 and CD3ε

[0325] A number of anti-CD38 x anti-CD3 bispecific antibodies were created in the so-called “bottle-opener” format. The antibodies contain a CD38-binding light chain and heavy chain along with a CD3-binding scFv-Fc fusion.

[0326] CD38 affinity was measured using an Octet HTX biosensor. Recombinant minimally biotinylated (<3 biotin/mol protein) human CD38-His (Fisher Scientific) or cynomolgus CD38-His (Sino Biological Inc.) were loaded on streptavidin tips to 2 nm loading level. The loaded tips were incubated in wells containing soluble test articles in a dilution series and binding was measured for 300 to 1200 sec. The tips were then transferred to wells containing buffer to measure dissociation for 500 to 5,400 sec. A 1:1 binding model was applied to all association and dissociation curves to generate a single association rate constant (ka) and a single dissociation rate constant (kd). The equilibrium dissociation constant KD affinities were derived as a ratio of the dissociation rate constant and the association rate constant (kd/ka). The results are provided in Table 1.

[0327] CD3ε affinity was measured by surface plasmon resonance using a SensiQ Pioneer FE. Recombinant human CD3ε-Fc or cynomolgus CD3ε-Fc were immobilized through amine coupling to CM5 chips to a final level of 50-65 RU. Sample association was performed for 60 sec. and dissociation for 300 sec. and the graphs were fitted with a 1:1 binding model. KD values for the high affinity antibodies (XmAb13551, XmAb13545, and Xmab13243) were derived as a ratio of the measured dissociation and association rate constants (koff/kon). The KD values for the low and medium affinity antibodies (XmAb15426, XmAb18967, XmAb18968, XmAb18969, XmAb18971, and XmAb18972) were determined by equilibrium analysis using three point fit curves. The results are provided in Table 1.

TABLE 1

| | Human | | | |
|---|---|---|---|---|
| | CD38 | Cyno | Human CD3ε | Cyno CD3ε |
| Antibody | K_{D} (nM) | CD38 K_{D} (nM) | K_{D} Eq (nM) | K_{D} Eq (nM) |
| XmAb13551 | 0.07 | 0.07 | 4.5 | 5.3 |
| XmAb18967 | 0.12 | 0.12 | 19.9 | 23.9 |
| (412219) | | | | |
| XmAb15426 | 0.09 | 0.10 | 92.9 | 121.5 |
| XmAb13545 | 0.8 | 1.2 | 7.7 | 9.1 |
| XmAb18968 | 2.5 | 2.8 | 29.7 | 33.5 |
| (412220) | | | | |
| XmAb18969 | 2.4 | 2.9 | 159.2 | 159 |
| (408257) | | | | |
| XmAb13243 | 3.6 | 4.8 | 6.3 | 7.0 |
| XmAb18971 | ND | ND | 44.5 | 51.9 |
| (419578) | | | | |
| XmAb18972 | 5.7 | 7.1 | 190.5 | 244 |
| (408303) | | | | |

[0328] The CD3ε-binding affinity of antibodies XmAb18967, XmAb18968, and XmAb18971 is intermediate for both human and cynomolgus CD3ε; lower than that of antibodies XmAb13551, XmAb13545, and Xmab13243, but higher than XmAb15426.

[0329] Additional affinity studies were performed to determine “absolute K_{D}.” Absolute K_{D} is a constant number reflecting the intrinsic binding characteristics of an antibody to a given target. Absolute K_{D} results from the integration of multiple Measured KD that can vary depending on target concentration. Absolute CD38 affinity was measured using an Octet HTX biosensor. Recombinant minimally biotinylated (<3 biotin/mol protein) human CD38-His (Fisher Scientific) or cynomolgus CD38-His (Sino Biological Inc.) were loaded on streptavidin tips to five increasing loading levels ranging from 0.3 to 2 nm. The loaded tips were incubated in wells containing soluble test articles in a dilution series and binding was measured for 300 to 1200 sec. The tips were then transferred to wells containing buffer to measure dissociation for 500 to 5,400 sec. A 1:1 binding model was applied to all association and dissociation curves to generate a single association rate constant (ka) and a single dissociation rate constant (kd). The equilibrium dissociation constant KD affinities were derived as a ratio of the dissociation rate constant and the association rate constant (kd/ka). The measured KD affinities were graphed as a function of CD38 loading level to identify the absolute KD affinity. The absolute KD affinity was derived from graphing the measured KD at each loading level as a function of CD38 concentration. Absolute KD was determined as the plateau value of the measured KD as CD38 concentration decreases. The results are provided in Table 2.

[0330] Absolute CD3ε affinity was measured by surface plasmon resonance using a Biacore T200 instrument (GE). Recombinant human CD3ε-Fc or cynomolgus CD3ε-Fc were used as immobilized ligands on CM5 chip surfaces using standard amine coupling (EDC/NHS) chemistry. A range of CD3ε-Fc immobilization densities were examined to define ligand density effects on the resultant binding and dissociation kinetics measured via non-linear regression to a 1:1 binding model. Sample association was performed for 60 sec. and dissociation for 300 sec. Data reported were acquired from the lowest density CM5 chip surface that yielded sufficient signal to noise without large systematic deviations from the 1:1 binding model. KD values were derived as a ratio of the dissociation rate constant and the association rate constant (koff/kon) that were fit globally using at least a 5-point dilution series spanning concentrations in excess and below the reported KD. The result is provided in Table 2. ND indicates that the values were not determined, and does not indicate a lack of affinity.

TABLE 2

| | | Absolute | |
|---|---|---|---|
| | Absolute Human | Cyno CD38 | Absolute Human |
| Antibody | CD38 KD (nM) | KD (nM) | CD3ε KD (nM) |
| XmAb13545 | 6.3 | 6.3 | ND |
| XmAb18968 | 8.9 | 7.5 | 35.6 |
| (412220) | | | |
| XmAb18969 | 8.1 | 6.4 | ND |
| (408257) | | | |

### Example 5: Activity of Anti-CD38 X Anti-CD3 Bispecific Antibodies in T Cell Dependent Cell Cytotoxicity (TDCC) Assays

[0331] A T cell dependent cell cytotoxicity (TDCC) assay against luciferase expressing human cell line MOLM13 was performed as follows: 2,500 target cells were mixed with 25,000 resting human T cells and incubated for 48 hours in the presence of anti-CD38-anti-CD3 XmAbs at concentrations ranging from 6 nM to 5.7×10⁻⁷ pM; luciferase signal was measured using Steady-Glo (Promega). An EC50 value was derived from the specific cytotoxicity curves (FIG. 78; Table 3).

TABLE 3

| | MOLM13 |
|---|---|
| | TDCC EC₅₀ |
| Antibody | (pM) |
| XmAb13551 | 1.3 |
| XmAb18967 | 9.2 |
| (412219) | |
| XmAb15426 | 1,318 |
| XmAb13545 | 7.5 |
| XmAb18968 | 91.4 |
| (412220) | |
| XmAb18969 | 6,857 |
| (408257) | |
| XmAb13243 | 62.6 |
| XmAb18971 | 213.3 |
| (419578) | |
| XmAb18972 | ND |
| (408303) | |

[0332] A T cell dependent cell cytotoxicity (TDCC) assay with cynomolgus peripheral blood mononuclear cells (PBMCs) was performed: 10,000 resting cynomolgus PBMCs were incubated for 72 hours in the presence of anti-CD38-anti-CD3 XmAbs at concentrations ranging from 6 nM to 5.7×10⁻⁷ pM; the total number of CD40 positive B cells remaining in each well was measured by flow cytometry with an anti-CD40 antibody (BD Biosciences). An EC50 value was derived from the specific cytotoxicity curves (FIG. 79; Table 4).

TABLE 4

| | Cyno B Cell |
|---|---|
| | TDCC EC₅₀ |
| | (pM) |
| XmAb13551 | 0.5 |
| XmAb18967 | 3.2 |
| (412219) | |
| XmAb15426 | ND |
| XmAb13545 | 5.9 |
| XmAb18968 | 82 |
| (412220) | |
| XmAb18969 | 1,648 |
| (408257) | |
| XmAb13243 | 54 |
| XmAb18971 | 101.5 |
| (419578) | |
| XmAb18972 | ND |
| (408303) | |

[0333] T cell dependent cell cytotoxicity (TDCC) assays against luciferase expressing human cell lines (KMS12BM, MOLM13, OPM2, U937, SKM1) with a range of CD38 expression levels were performed: 2,500 target cells were mixed with 25,000 resting human T cells and incubated for 48 hours in the presence of CD38 XmAbs at concentrations ranging from 6 nM to 5.7×10⁻⁷ pM; luciferase signal was measured using Steady-Glo (Promega). An EC50 value was derived from the specific cytotoxicity curves. Between three and six T cell donors were used and the average EC50 from all the donors is recorded in the Table 5.

[0334] CD38 receptor density (number of antibody binding sites per cell) was assessed using a Qifikit assay (Dako) and an anti-human CD38 mouse monoclonal antibody (clone HIT2)(FIG. 80).

TABLE 5

| | KMS12BM | MOLM13 | OPM2 | U937 | SKM1 |
|---|---|---|---|---|---|
| CD38 Receptor | 75,192 | 44,137 | 38,470 | 10,363 | <2,000 |
| Density | | | | | |
| Human T cell | 3 | 6 | 3 | 3 | 6 |
| donors tested | | | | | |
| XmAb18968 | 5 | 32 | 113 | 40 | 67 |
| (412220) EC₅₀ | | | | | |
| (nM) | | | | | |
| XmAb18971 | 10 | 267 | 211 | 103 | 7,413 |
| (419578) EC₅₀ | | | | | |
| (nM) | | | | | |
| XmAb18969 | 493 | 11,116 | 29,860 | 4,513 | >67,430 |
| (408257) EC₅₀ | | | | | |
| (nM) | | | | | |

[0335] As shown in Table 5, XmAb18968 (412220) is effective at triggering TDCC on cells having a broad range of CD38 on their surface, including those having less than 2,000 CD38 molecules. XmAb18971 (419578) also is effective at triggering TDCC in the cell lines tested though the antibody was less effective than XmAb18968 (412220) at targeting the low CD38-expressing SKM1 cell line.

### Example 6: Pharmacokinetic/Pharmacodynamics (PK/PD) Studies in Non-Human Primates

[0336] In a first study, groups of three cynomolgus monkeys for each antibody tested received a pre-dose on Day 0 (15 or 100 mg/kg) followed by a therapeutic dose on day 1 and day 4 (45, 75, or 500 mg/kg). Serum IL-6 levels were measured 4 hours after the first therapeutic dose, and the number of circulating B cells was analyzed by flow cytometry from blood samples on days 4, 7, and 10. Average maximal B cell depletion compared to the pre-dose numbers at day 7 or day 10 is presented. The results are provided in Table 6.

TABLE 6

| | | IL-6 | Max B Cell Depletion |
|---|---|---|---|
| Antibody | In vivo Dosing (mg/Kg) | (pg/ml) | (−% of Pre-dose) |
| XmAb13551 | 15, 45 × 2 | 5,612 | Not tolerated |
| XmAb13545 | 15, 45 × 2 | 794 | −47% |
| XmAb13243 | 15, 75 × 2 | 800 | −74% |
| XmAb18967 | 15, 75 × 2 | 27 | −54% |
| (412219) | | | |
| XmAb15426 | 100, 500 × 2 | 3 | −70% |

[0337] In a subsequent PK/PD study, groups of three cynomolgus monkeys for each antibody tested received a pre-dose on Day 0 followed by a therapeutic dose on day 1, 4, 7 and 10. MCP-1 levels were measured 4 hours after the first therapeutic dose. The number of circulating B cells was analyzed by flow cytometry from blood samples on days 4, 7, 10, 11 and 13 (FIG. 81). The results are summarized in Table 6. Average maximal B cell depletion compared to the pre-dose numbers at day 11 is presented.

TABLE 7

| | | | Max B |
|---|---|---|---|
| | | MCP1 | Cell Depletion |
| Antibody | In vivo Dosing (mg/Kg) | (pg/ml) | (−% of Pre-dose) |
| XmAb13243 | 15, 60 × 4 | 327,322 | −80 |
| XmAb18967 | 15, 100 × 4 | 60,352 | −78 |
| (412219) | | | |
| XmAb18968 | 15, 100 × 4 | 94,543 | −95 |
| (412220) | | | |
| XmAb18968 | 10, 150 × 4 | 11,185 | −99 |
| (412220) | | | |
| XmAb18971 | 10, 150 × 4 | 10,864 | −90 |
| (419578) | | | |
| XmAb18969 | 300, 1000, 1500 × 3 | 5,526 | −94 |
| (408257) | | | |

[0338] MCP-1 is a cytokine released upon T cell activation. This Example demonstrates that anti-CD3 x anti-CD38 antibodies having “intermediate” or “medium” affinity levels for both targets, e.g., XmAb18968 (412220), mediate release of lower levels of cytokines while still depleting CD38⁺ B cells. The Example provides additional evidence that the antibodies of the disclosure safely and efficiently activate the immune system and cause target cell depletion.

The application's sequence listing, which the Patent Office published only in electronic form, follows.

SEQUENCE LISTING (355 sequences)

SEQ ID NO: 1 - protein, 125 aa, Artificial Sequence
  Variable heavy (vh) domain
EVQLVESGGGLVQPGGSLRLSCAASGFTFSTYAMNWVRQAPGKGLEWVGRIRSKYNNYATYYADSVKGRFTISRDDSKNTLYLQMNSLRAEDTAVYYCVRHGNFGDSYVSWFAYWGQGTLVTVSS

SEQ ID NO: 2 - protein, 5 aa, Artificial Sequence
  vhCDR1
TYAMN

SEQ ID NO: 3 - protein, 19 aa, Artificial Sequence
  vhCDR2
RIRSKYNNYATYYADSVKG

SEQ ID NO: 4 - protein, 14 aa, Artificial Sequence
  vhCDR3
HGNFGDSYVSWFAY

SEQ ID NO: 5 - protein, 109 aa, Artificial Sequence
  Variable light (vl) domain
QAVVTQEPSLTVSPGGTVTLTCGSSTGAVTTSNYANWVQQKPGKSPRGLIGGTNKRAPGVPARFSGSLLGGKAALTISGAQPEDEADYYCALWYSNHWVFGGGTKLTVL

SEQ ID NO: 6 - protein, 14 aa, Artificial Sequence
  vlCDR1
GSSTGAVTTSNYAN

SEQ ID NO: 7 - protein, 7 aa, Artificial Sequence
  vlCDR2
GTNKRAP

SEQ ID NO: 8 - protein, 9 aa, Artificial Sequence
  vlCDR3
ALWYSNHWV

SEQ ID NO: 9 - protein, 254 aa, Artificial Sequence
  scFv (including charged linker)
EVQLVESGGGLVQPGGSLRLSCAASGFTFSTYAMNWVRQAPGKGLEWVGRIRSKYNNYATYYADSVKGRFTISRDDSKNTLYLQMNSLRAEDTAVYYCVRHGNFGDSYVSWFAYWGQGTLVTVSSGKPGSGKPGSGKPGSGKPGSQAVVTQEPSLTVSPGGTVTLTCGSSTGAVTTSNYANWVQQKPGKSPRGLIGGTNKRAPGVPARFSGSLLGGKAALTISGAQPEDEADYYCALWYSNHWVFGGGTKLTVL

SEQ ID NO: 10 - protein, 125 aa, Artificial Sequence
  Variable heavy (vh) domain
EVQLVESGGGLVQPGGSLRLSCAASGFTFSTYAMNWVRQAPGKGLEWVGRIRSKANNYATYYADSVKGRFTISRDDSKNTLYLQMNSLRAEDTAVYYCVRHGNFGDSYVSWFAYWGQGTLVTVSS

SEQ ID NO: 11 - protein, 5 aa, Artificial Sequence
  vhCDR1
TYAMN

SEQ ID NO: 12 - protein, 19 aa, Artificial Sequence
  vhCDR2
RIRSKANNYATYYADSVKG

SEQ ID NO: 13 - protein, 14 aa, Artificial Sequence
  vhCDR3
HGNFGDSYVSWFAY

SEQ ID NO: 14 - protein, 109 aa, Artificial Sequence; identical to SEQ ID NO: 5
  Variable light (vl) domain

SEQ ID NO: 15 - protein, 14 aa, Artificial Sequence
  vlCDR1
GSSTGAVTTSNYAN

SEQ ID NO: 16 - protein, 7 aa, Artificial Sequence
  vlCDR2
GTNKRAP

SEQ ID NO: 17 - protein, 9 aa, Artificial Sequence
  vlCDR3
ALWYSNHWV

SEQ ID NO: 18 - protein, 254 aa, Artificial Sequence
  scFv (including charged linker)
EVQLVESGGGLVQPGGSLRLSCAASGFTFSTYAMNWVRQAPGKGLEWVGRIRSKANNYATYYADSVKGRFTISRDDSKNTLYLQMNSLRAEDTAVYYCVRHGNFGDSYVSWFAYWGQGTLVTVSSGKPGSGKPGSGKPGSGKPGSQAVVTQEPSLTVSPGGTVTLTCGSSTGAVTTSNYANWVQQKPGKSPRGLIGGTNKRAPGVPARFSGSLLGGKAALTISGAQPEDEADYYCALWYSNHWVFGGGTKLTVL

SEQ ID NO: 19 - protein, 125 aa, Artificial Sequence
  Variable heavy (vh) domain
EVQLVESGGGLVQPGGSLRLSCAASGFTFSTYAMNWVRQAPGKGLEWVGRIRSKYNNYATYYADSVKGRFTISRDDSKNTLYLQMNSLRAEDTAVYYCVRHGNFGDEYVSWFAYWGQGTLVTVSS

SEQ ID NO: 20 - protein, 5 aa, Artificial Sequence
  vhCDR1
TYAMN

SEQ ID NO: 21 - protein, 19 aa, Artificial Sequence
  vhCDR2
RIRSKYNNYATYYADSVKG

SEQ ID NO: 22 - protein, 14 aa, Artificial Sequence
  vhCDR3
HGNFGDEYVSWFAY

SEQ ID NO: 23 - protein, 109 aa, Artificial Sequence; identical to SEQ ID NO: 5
  Variable light (vl) domain

SEQ ID NO: 24 - protein, 14 aa, Artificial Sequence
  vlCDR1
GSSTGAVTTSNYAN

SEQ ID NO: 25 - protein, 7 aa, Artificial Sequence
  vlCDR2
GTNKRAP

SEQ ID NO: 26 - protein, 9 aa, Artificial Sequence
  vlCDR3
ALWYSNHWV

SEQ ID NO: 27 - protein, 254 aa, Artificial Sequence
  scFv (including charged linker)
EVQLVESGGGLVQPGGSLRLSCAASGFTFSTYAMNWVRQAPGKGLEWVGRIRSKYNNYATYYADSVKGRFTISRDDSKNTLYLQMNSLRAEDTAVYYCVRHGNFGDEYVSWFAYWGQGTLVTVSSGKPGSGKPGSGKPGSGKPGSQAVVTQEPSLTVSPGGTVTLTCGSSTGAVTTSNYANWVQQKPGKSPRGLIGGTNKRAPGVPARFSGSLLGGKAALTISGAQPEDEADYYCALWYSNHWVFGGGTKLTVL

SEQ ID NO: 28 - protein, 125 aa, Artificial Sequence
  Variable heavy (vh) domain
EVQLVESGGGLVQPGGSLRLSCAASGFTFSTYAMNWVRQAPGKGLEWVGRIRSKYNNYATYYADSVKGRFTISRDDSKNTLYLQMNSLRAEDTAVYYCVRHGNFGDPYVSWFAYWGQGTLVTVSS

SEQ ID NO: 29 - protein, 5 aa, Artificial Sequence
  vhCDR1
TYAMN

SEQ ID NO: 30 - protein, 19 aa, Artificial Sequence
  vhCDR2
RIRSKYNNYATYYADSVKG

SEQ ID NO: 31 - protein, 14 aa, Artificial Sequence
  vhCDR3
HGNFGDPYVSWFAY

SEQ ID NO: 32 - protein, 109 aa, Artificial Sequence; identical to SEQ ID NO: 5
  Variable light (vl) domain

SEQ ID NO: 33 - protein, 14 aa, Artificial Sequence
  vlCDR1
GSSTGAVTTSNYAN

SEQ ID NO: 34 - protein, 7 aa, Artificial Sequence
  vlCDR2
GTNKRAP

SEQ ID NO: 35 - protein, 9 aa, Artificial Sequence
  vlCDR3
ALWYSNHWV

SEQ ID NO: 36 - protein, 254 aa, Artificial Sequence
  scFv (including charged linker)
EVQLVESGGGLVQPGGSLRLSCAASGFTFSTYAMNWVRQAPGKGLEWVGRIRSKYNNYATYYADSVKGRFTISRDDSKNTLYLQMNSLRAEDTAVYYCVRHGNFGDPYVSWFAYWGQGTLVTVSSGKPGSGKPGSGKPGSGKPGSQAVVTQEPSLTVSPGGTVTLTCGSSTGAVTTSNYANWVQQKPGKSPRGLIGGTNKRAPGVPARFSGSLLGGKAALTISGAQPEDEADYYCALWYSNHWVFGGGTKLTVL

SEQ ID NO: 37 - protein, 125 aa, Artificial Sequence
  Variable heavy (vh) domain
EVQLVESGGGLVQPGGSLRLSCAASGFTFSTYAMNWVRQAPGKGLEWVGRIRSKYNNYATYYADSVKGRFTISRDDSKNTLYLQMNSLRAEDTAVYYCVRHGNFGDSYVSWFDYWGQGTLVTVSS

SEQ ID NO: 38 - protein, 5 aa, Artificial Sequence
  vhCDR1
TYAMN

SEQ ID NO: 39 - protein, 19 aa, Artificial Sequence
  vhCDR2
RIRSKYNNYATYYADSVKG

SEQ ID NO: 40 - protein, 14 aa, Artificial Sequence
  vhCDR3
HGNFGDSYVSWFDY

SEQ ID NO: 41 - protein, 109 aa, Artificial Sequence; identical to SEQ ID NO: 5
  Variable light (vl) domain

SEQ ID NO: 42 - protein, 14 aa, Artificial Sequence
  vlCDR1
GSSTGAVTTSNYAN

SEQ ID NO: 43 - protein, 7 aa, Artificial Sequence
  vlCDR2
GTNKRAP

SEQ ID NO: 44 - protein, 9 aa, Artificial Sequence
  vlCDR3
ALWYSNHWV

SEQ ID NO: 45 - protein, 254 aa, Artificial Sequence
  scFv (including charged linker)
EVQLVESGGGLVQPGGSLRLSCAASGFTFSTYAMNWVRQAPGKGLEWVGRIRSKYNNYATYYADSVKGRFTISRDDSKNTLYLQMNSLRAEDTAVYYCVRHGNFGDSYVSWFDYWGQGTLVTVSSGKPGSGKPGSGKPGSGKPGSQAVVTQEPSLTVSPGGTVTLTCGSSTGAVTTSNYANWVQQKPGKSPRGLIGGTNKRAPGVPARFSGSLLGGKAALTISGAQPEDEADYYCALWYSNHWVFGGGTKLTVL

SEQ ID NO: 46 - protein, 125 aa, Artificial Sequence
  Variable heavy (vh) domain
EVQLVESGGGLVQPGGSLRLSCAASGFTFSTYAMSWVRQAPGKGLEWVGRIRSKYNNYATYYADSVKGRFTISRDDSKNTLYLQMNSLRAEDTAVYYCVRHGNFGDSYVSWFAYWGQGTLVTVSS

SEQ ID NO: 47 - protein, 5 aa, Artificial Sequence
  vhCDR1
TYAMS

SEQ ID NO: 48 - protein, 19 aa, Artificial Sequence
  vhCDR2
RIRSKYNNYATYYADSVKG

SEQ ID NO: 49 - protein, 14 aa, Artificial Sequence
  vhCDR3
HGNFGDSYVSWFAY

SEQ ID NO: 50 - protein, 109 aa, Artificial Sequence; identical to SEQ ID NO: 5
  Variable light (vl) domain

SEQ ID NO: 51 - protein, 14 aa, Artificial Sequence
  vlCDR1
GSSTGAVTTSNYAN

SEQ ID NO: 52 - protein, 7 aa, Artificial Sequence
  vlCDR2
GTNKRAP

SEQ ID NO: 53 - protein, 9 aa, Artificial Sequence
  vlCDR3
ALWYSNHWV

SEQ ID NO: 54 - protein, 254 aa, Artificial Sequence
  scFv (including charged linker)
EVQLVESGGGLVQPGGSLRLSCAASGFTFSTYAMSWVRQAPGKGLEWVGRIRSKYNNYATYYADSVKGRFTISRDDSKNTLYLQMNSLRAEDTAVYYCVRHGNFGDSYVSWFAYWGQGTLVTVSSGKPGSGKPGSGKPGSGKPGSQAVVTQEPSLTVSPGGTVTLTCGSSTGAVTTSNYANWVQQKPGKSPRGLIGGTNKRAPGVPARFSGSLLGGKAALTISGAQPEDEADYYCALWYSNHWVFGGGTKLTVL

SEQ ID NO: 55 - protein, 116 aa, Artificial Sequence
  Variable heavy (vh) domain
EVQLVESGGGLVQPGGSLRLSCAASGFTFSYSWMNWVRQAPGKGLEWVSEINPQSSTINYATSVKGRFTISRDNSKNTLYLQMNSLRAEDTAVYYCARYGNWFPYWGQGTLVTVSS

SEQ ID NO: 56 - protein, 5 aa, Artificial Sequence
  vhCDR1
YSWMN

SEQ ID NO: 57 - protein, 17 aa, Artificial Sequence
  vhCDR2
EINPQSSTINYATSVKG

SEQ ID NO: 58 - protein, 7 aa, Artificial Sequence
  vhCDR3
YGNWFPY

SEQ ID NO: 59 - protein, 107 aa, Artificial Sequence
  Variable light (vl) domain
DIVMTQSPSSLSASVGDRVTITCRASQNVDTWVAWYQQKPGQSPKALIYSASYRYSGVPDRFTGSGSGTDFTLTISSLQPEDFATYFCQQYDSYPLTFGGGTKLEIK

SEQ ID NO: 60 - protein, 11 aa, Artificial Sequence
  vlCDR1
RASQNVDTWVA

SEQ ID NO: 61 - protein, 7 aa, Artificial Sequence
  vlCDR2
SASYRYS

SEQ ID NO: 62 - protein, 9 aa, Artificial Sequence
  vlCDR3
QQYDSYPLT

SEQ ID NO: 63 - protein, 243 aa, Artificial Sequence
  scFv (including charged linker)
EVQLVESGGGLVQPGGSLRLSCAASGFTFSYSWMNWVRQAPGKGLEWVSEINPQSSTINYATSVKGRFTISRDNSKNTLYLQMNSLRAEDTAVYYCARYGNWFPYWGQGTLVTVSSGKPGSGKPGSGKPGSGKPGSDIVMTQSPSSLSASVGDRVTITCRASQNVDTWVAWYQQKPGQSPKALIYSASYRYSGVPDRFTGSGSGTDFTLTISSLQPEDFATYFCQQYDSYPLTFGGGTKLEIK

SEQ ID NO: 64 - protein, 116 aa, Artificial Sequence
  Variable heavy (vh) domain
EVQLVESGGGLVQPGGSLRLSCAASGFDFSRSWMNWVRQAPGKGLEWVSEINPDSSTINYATSVKGRFTISRDNSKNTLYLQMNSLRAEDTAVYYCARYGNWFPYWGQGTLVTVSS

SEQ ID NO: 65 - protein, 5 aa, Artificial Sequence
  vhCDR1
RSWMN

SEQ ID NO: 66 - protein, 17 aa, Artificial Sequence
  vhCDR2
EINPDSSTINYATSVKG

SEQ ID NO: 67 - protein, 7 aa, Artificial Sequence
  vhCDR3
YGNWFPY

SEQ ID NO: 68 - protein, 107 aa, Artificial Sequence; identical to SEQ ID NO: 59
  Variable light (vl) domain

SEQ ID NO: 69 - protein, 11 aa, Artificial Sequence
  vlCDR1
RASQNVDTWVA

SEQ ID NO: 70 - protein, 7 aa, Artificial Sequence
  vlCDR2
SASYRYS

SEQ ID NO: 71 - protein, 9 aa, Artificial Sequence
  vlCDR3
QQYDSYPLT

SEQ ID NO: 72 - protein, 243 aa, Artificial Sequence
  scFv (including charged linker)
EVQLVESGGGLVQPGGSLRLSCAASGFDFSRSWMNWVRQAPGKGLEWVSEINPDSSTINYATSVKGRFTISRDNSKNTLYLQMNSLRAEDTAVYYCARYGNWFPYWGQGTLVTVSSGKPGSGKPGSGKPGSGKPGSDIVMTQSPSSLSASVGDRVTITCRASQNVDTWVAWYQQKPGQSPKALIYSASYRYSGVPDRFTGSGSGTDFTLTISSLQPEDFATYFCQQYDSYPLTFGGGTKLEIK

SEQ ID NO: 73 - protein, 116 aa, Artificial Sequence; identical to SEQ ID NO: 64
  Variable heavy (vh) domain

SEQ ID NO: 74 - protein, 5 aa, Artificial Sequence
  vhCDR1
RSWMN

SEQ ID NO: 75 - protein, 17 aa, Artificial Sequence
  vhCDR2
EINPDSSTINYATSVKG

SEQ ID NO: 76 - protein, 7 aa, Artificial Sequence
  vhCDR3
YGNWFPY

SEQ ID NO: 77 - protein, 116 aa, Artificial Sequence; identical to SEQ ID NO: 64
  Variable light (vl) domain

SEQ ID NO: 78 - protein, 11 aa, Artificial Sequence
  vlCDR1
RASQNVDTNVA

SEQ ID NO: 79 - protein, 7 aa, Artificial Sequence
  vlCDR2
SASYRYS

SEQ ID NO: 80 - protein, 9 aa, Artificial Sequence
  vlCDR3
QQYDSYPLT

SEQ ID NO: 81 - protein, 252 aa, Artificial Sequence
  scFv (including charged linker)
EVQLVESGGGLVQPGGSLRLSCAASGFDFSRSWMNWVRQAPGKGLEWVSEINPDSSTINYATSVKGRFTISRDNSKNTLYLQMNSLRAEDTAVYYCARYGNWFPYWGQGTLVTVSSGKPGSGKPGSGKPGSGKPGSEVQLVESGGGLVQPGGSLRLSCAASGFDFSRSWMNWVRQAPGKGLEWVSEINPDSSTINYATSVKGRFTISRDNSKNTLYLQMNSLRAEDTAVYYCARYGNWFPYWGQGTLVTVSS

SEQ ID NO: 82 - protein, 445 aa, Artificial Sequence
  XENP13551 HC-Fab
EVQLVESGGGLVQPGGSLRLSCAASGFTFSYSWMNWVRQAPGKGLEWVSEINPQSSTINYATSVKGRFTISRDNSKNTLYLQMNSLRAEDTAVYYCARYGNWFPYWGQGTLVTVSSASTKGPSVFPLAPSSKSTSGGTAALGCLVKDYFPEPVTVSWNSGALTSGVHTFPAVLQSSGLYSLSSVVTVPSSSLGTQTYICNVNHKPSDTKVDKKVEPKSCDKTHTCPPCPAPPVAGPSVFLFPPKPKDTLMISRTPEVTCVVVDVKHEDPEVKFNWYVDGVEVHNAKTKPREEEYNSTYRVVSVLTVLHQDWLNGKEYKCKVSNKALPAPIEKTISKAKGQPREPQVYTLPPSREEMTKNQVSLTCDVSGFYPSDIAVEWESDGQPENNYKTTPPVLDSDGSFFLYSKLTVDKSRWEQGDVFSCSVMHEALHNHYTQKSLSLSPGK

SEQ ID NO: 83 - protein, 485 aa, Artificial Sequence
  XENP13551 HC-scFv
EVQLVESGGGLVQPGGSLRLSCAASGFTFSTYAMNWVRQAPGKGLEWVGRIRSKYNNYATYYADSVKGRFTISRDDSKNTLYLQMNSLRAEDTAVYYCVRHGNFGDSYVSWFAYWGQGTLVTVSSGKPGSGKPGSGKPGSGKPGSQAVVTQEPSLTVSPGGTVTLTCGSSTGAVTTSNYANWVQQKPGKSPRGLIGGTNKRAPGVPARFSGSLLGGKAALTISGAQPEDEADYYCALWYSNHWVFGGGTKLTVLEPKSSDKTHTCPPCPAPPVAGPSVFLFPPKPKDTLMISRTPEVTCVVVDVKHEDPEVKFNWYVDGVEVHNAKTKPREEQYNSTYRVVSVLTVLHQDWLNGKEYKCKVSNKALPAPIEKTISKAKGQPREPQVYTLPPSREQMTKNQVKLTCLVKGFYPSDIAVEWESNGQPENNYKTTPPVLDSDGSFFLYSKLTVDKSRWQQGNVFSCSVMHEALHNHYTQKSLSLSPGK

SEQ ID NO: 84 - protein, 214 aa, Artificial Sequence
  XENP13551 LC
DIVMTQSPSSLSASVGDRVTITCRASQNVDTWVAWYQQKPGQSPKALIYSASYRYSGVPDRFTGSGSGTDFTLTISSLQPEDFATYFCQQYDSYPLTFGGGTKLEIKRTVAAPSVFIFPPSDEQLKSGTASVVCLLNNFYPREAKVQWKVDNALQSGNSQESVTEQDSKDSTYSLSSTLTLSKADYEKHKVYACEVTHQGLSSPVTKSFNRGEC

SEQ ID NO: 85 - protein, 445 aa, Artificial Sequence
  XENP13243 HC-Fab
EVQLVESGGGLVQPGGSLRLSCAASGFDFSRSWMNWVRQAPGKGLEWVSEINPDSSTINYATSVKGRFTISRDNSKNTLYLQMNSLRAEDTAVYYCARYGNWFPYWGQGTLVTVSSASTKGPSVFPLAPSSKSTSGGTAALGCLVKDYFPEPVTVSWNSGALTSGVHTFPAVLQSSGLYSLSSVVTVPSSSLGTQTYICNVNHKPSDTKVDKKVEPKSCDKTHTCPPCPAPPVAGPSVFLFPPKPKDTLMISRTPEVTCVVVDVKHEDPEVKFNWYVDGVEVHNAKTKPREEEYNSTYRVVSVLTVLHQDWLNGKEYKCKVSNKALPAPIEKTISKAKGQPREPQVYTLPPSREEMTKNQVSLTCDVSGFYPSDIAVEWESDGQPENNYKTTPPVLDSDGSFFLYSKLTVDKSRWEQGDVFSCSVMHEALHNHYTQKSLSLSPGK

SEQ ID NO: 86 - protein, 485 aa, Artificial Sequence; identical to SEQ ID NO: 83
  XENP13243 HC-scFv

SEQ ID NO: 87 - protein, 214 aa, Artificial Sequence
  XENP13243 LC
DIVMTQSPSSLSASVGDRVTITCRASQNVDTNVAWYQQKPGQSPKALIYSASYRYSGVPDRFTGSGSGTDFTLTISSLQPEDFATYFCQQYDSYPLTFGGGTKLEIKRTVAAPSVFIFPPSDEQLKSGTASVVCLLNNFYPREAKVQWKVDNALQSGNSQESVTEQDSKDSTYSLSSTLTLSKADYEKHKVYACEVTHQGLSSPVTKSFNRGEC

SEQ ID NO: 88 - protein, 445 aa, Artificial Sequence; identical to SEQ ID NO: 82
  XENP14702 Anti-CD38

SEQ ID NO: 89 - protein, 485 aa, Artificial Sequence
  XENP14702 Anti-CD38
EVQLVESGGGLVQPGGSLRLSCAASGFTFSTYAMSWVRQAPGKGLEWVGRIRSKYNNYATYYADSVKGRFTISRDDSKNTLYLQMNSLRAEDTAVYYCVRHGNFGDSYVSWFAYWGQGTLVTVSSGKPGSGKPGSGKPGSGKPGSQAVVTQEPSLTVSPGGTVTLTCGSSTGAVTTSNYANWVQQKPGKSPRGLIGGTNKRAPGVPARFSGSLLGGKAALTISGAQPEDEADYYCALWYSNHWVFGGGTKLTVLEPKSSDKTHTCPPCPAPPVAGPSVFLFPPKPKDTLMISRTPEVTCVVVDVKHEDPEVKFNWYVDGVEVHNAKTKPREEQYNSTYRVVSVLTVLHQDWLNGKEYKCKVSNKALPAPIEKTISKAKGQPREPQVYTLPPSREQMTKNQVKLTCLVKGFYPSDIAVEWESNGQPENNYKTTPPVLDSDGSFFLYSKLTVDKSRWQQGNVFSCSVMHEALHNHYTQKSLSLSPGK

SEQ ID NO: 90 - protein, 214 aa, Artificial Sequence; identical to SEQ ID NO: 84
  XENP14702 Anti-CD38

SEQ ID NO: 91 - protein, 445 aa, Artificial Sequence; identical to SEQ ID NO: 82
  XENP15426 Anti-CD38

SEQ ID NO: 92 - protein, 485 aa, Artificial Sequence
  XENP15426 Anti-CD38
EVQLVESGGGLVQPGGSLRLSCAASGFTFSTYAMNWVRQAPGKGLEWVGRIRSKYNNYATYYADSVKGRFTISRDDSKNTLYLQMNSLRAEDTAVYYCVRHGNFGDSYVSWFDYWGQGTLVTVSSGKPGSGKPGSGKPGSGKPGSQAVVTQEPSLTVSPGGTVTLTCGSSTGAVTTSNYANWVQQKPGKSPRGLIGGTNKRAPGVPARFSGSLLGGKAALTISGAQPEDEADYYCALWYSNHWVFGGGTKLTVLEPKSSDKTHTCPPCPAPPVAGPSVFLFPPKPKDTLMISRTPEVTCVVVDVKHEDPEVKFNWYVDGVEVHNAKTKPREEQYNSTYRVVSVLTVLHQDWLNGKEYKCKVSNKALPAPIEKTISKAKGQPREPQVYTLPPSREQMTKNQVKLTCLVKGFYPSDIAVEWESNGQPENNYKTTPPVLDSDGSFFLYSKLTVDKSRWQQGNVFSCSVMHEALHNHYTQKSLSLSPGK

SEQ ID NO: 93 - protein, 214 aa, Artificial Sequence; identical to SEQ ID NO: 84
  XENP15426 Anti-CD38

SEQ ID NO: 94 - protein, 445 aa, Artificial Sequence; identical to SEQ ID NO: 85
  XENP14701 Anti-CD38

SEQ ID NO: 95 - protein, 485 aa, Artificial Sequence; identical to SEQ ID NO: 89
  XENP14701 Anti-CD38

SEQ ID NO: 96 - protein, 214 aa, Artificial Sequence; identical to SEQ ID NO: 87
  XENP14701 Anti-CD38

SEQ ID NO: 97 - protein, 445 aa, Artificial Sequence; identical to SEQ ID NO: 85
  XENP14703 Heavy Chain 1

SEQ ID NO: 98 - protein, 485 aa, Artificial Sequence; identical to SEQ ID NO: 89
  XENP14703 Heavy Chain 2

SEQ ID NO: 99 - protein, 214 aa, Artificial Sequence
  XENP14703 Light Chain
DIVMTQSPSSLSASVGDRVTITCRASQNVDTNVAWYQQKPGQSPKALIYSASYRKSGVPDRFTGSGSGTDFTLTISSLQPEDFATYFCQQYDSYPLTFGGGTKLEIKRTVAAPSVFIFPPSDEQLKSGTASVVCLLNNFYPREAKVQWKVDNALQSGNSQESVTEQDSKDSTYSLSSTLTLSKADYEKHKVYACEVTHQGLSSPVTKSFNRGEC

SEQ ID NO: 100 - protein, 445 aa, Artificial Sequence; identical to SEQ ID NO: 85
  XENP13243 Anti-CD38

SEQ ID NO: 101 - protein, 485 aa, Artificial Sequence; identical to SEQ ID NO: 83
  XENP13243 Anti-CD38

SEQ ID NO: 102 - protein, 214 aa, Artificial Sequence; identical to SEQ ID NO: 87
  XENP13243 Anti-CD38

SEQ ID NO: 103 - protein, 445 aa, Artificial Sequence; identical to SEQ ID NO: 82
  XENP18967 Anti-CD38

SEQ ID NO: 104 - protein, 485 aa, Artificial Sequence
  XENP18967 Anti-CD38
EVQLVESGGGLVQPGGSLRLSCAASGFTFSTYAMNWVRQAPGKGLEWVGRIRSKANNYATYYADSVKGRFTISRDDSKNTLYLQMNSLRAEDTAVYYCVRHGNFGDSYVSWFAYWGQGTLVTVSSGKPGSGKPGSGKPGSGKPGSQAVVTQEPSLTVSPGGTVTLTCGSSTGAVTTSNYANWVQQKPGKSPRGLIGGTNKRAPGVPARFSGSLLGGKAALTISGAQPEDEADYYCALWYSNHWVFGGGTKLTVLEPKSSDKTHTCPPCPAPPVAGPSVFLFPPKPKDTLMISRTPEVTCVVVDVKHEDPEVKFNWYVDGVEVHNAKTKPREEQYNSTYRVVSVLTVLHQDWLNGKEYKCKVSNKALPAPIEKTISKAKGQPREPQVYTLPPSREQMTKNQVKLTCLVKGFYPSDIAVEWESNGQPENNYKTTPPVLDSDGSFFLYSKLTVDKSRWQQGNVFSCSVMHEALHNHYTQKSLSLSPGK

SEQ ID NO: 105 - protein, 214 aa, Artificial Sequence; identical to SEQ ID NO: 84
  XENP18967 Anti-CD38

SEQ ID NO: 106 - protein, 445 aa, Artificial Sequence; identical to SEQ ID NO: 85
  XENP18971 Anti-CD38

SEQ ID NO: 107 - protein, 485 aa, Artificial Sequence; identical to SEQ ID NO: 104
  XENP18971 Anti-CD38

SEQ ID NO: 108 - protein, 214 aa, Artificial Sequence; identical to SEQ ID NO: 87
  XENP18971 Anti-CD38

SEQ ID NO: 109 - protein, 445 aa, Artificial Sequence; identical to SEQ ID NO: 85
  XENP18969 Anti-CD38

SEQ ID NO: 110 - protein, 485 aa, Artificial Sequence; identical to SEQ ID NO: 92
  XENP18969 Anti-CD38

SEQ ID NO: 111 - protein, 214 aa, Artificial Sequence; identical to SEQ ID NO: 84
  XENP18969 Anti-CD38

SEQ ID NO: 112 - protein, 445 aa, Artificial Sequence; identical to SEQ ID NO: 85
  XENP18970 Anti-CD38

SEQ ID NO: 113 - protein, 485 aa, Artificial Sequence; identical to SEQ ID NO: 89
  XENP18970 Anti-CD38

SEQ ID NO: 114 - protein, 214 aa, Artificial Sequence; identical to SEQ ID NO: 84
  XENP18970 Anti-CD38

SEQ ID NO: 115 - protein, 445 aa, Artificial Sequence; identical to SEQ ID NO: 85
  XENP18972 Anti-CD38

SEQ ID NO: 116 - protein, 485 aa, Artificial Sequence; identical to SEQ ID NO: 92
  XENP18972 Anti-CD38

SEQ ID NO: 117 - protein, 214 aa, Artificial Sequence; identical to SEQ ID NO: 87
  XENP18972 Anti-CD38

SEQ ID NO: 118 - protein, 445 aa, Artificial Sequence; identical to SEQ ID NO: 85
  XENP18973 Anti-CD38

SEQ ID NO: 119 - protein, 485 aa, Artificial Sequence; identical to SEQ ID NO: 89
  XENP18973 Anti-CD38

SEQ ID NO: 120 - protein, 214 aa, Artificial Sequence; identical to SEQ ID NO: 87
  XENP18973 Anti-CD38

SEQ ID NO: 121 - protein, 445 aa, Artificial Sequence; identical to SEQ ID NO: 85
  XENP15055 Anti-CD38

SEQ ID NO: 122 - protein, 485 aa, Artificial Sequence; identical to SEQ ID NO: 92
  XENP15055 Anti-CD38

SEQ ID NO: 123 - protein, 214 aa, Artificial Sequence; identical to SEQ ID NO: 87
  XENP15055 Anti-CD38

SEQ ID NO: 124 - protein, 445 aa, Artificial Sequence; identical to SEQ ID NO: 85
  XENP13544 Anti-CD38

SEQ ID NO: 125 - protein, 485 aa, Artificial Sequence
  XENP13544 Anti-CD38
EVQLVESGGGLVQPGGSLRLSCAASGFTFSTYAMNWVRQAPGKCLEWVGRIRSKYNNYATYYADSVKGRFTISRDDSKNTLYLQMNSLRAEDTAVYYCVRHGNFGDSYVSWFAYWGQGTLVTVSSGKPGSGKPGSGKPGSGKPGSQAVVTQEPSLTVSPGGTVTLTCGSSTGAVTTSNYANWVQQKPGKSPRGLIGGTNKRAPGVPARFSGSLLGGKAALTISGAQPEDEADYYCALWYSNHWVFGCGTKLTVLEPKSSDKTHTCPPCPAPPVAGPSVFLFPPKPKDTLMISRTPEVTCVVVDVKHEDPEVKFNWYVDGVEVHNAKTKPREEQYNSTYRVVSVLTVLHQDWLNGKEYKCKVSNKALPAPIEKTISKAKGQPREPQVYTLPPSREQMTKNQVKLTCLVKGFYPSDIAVEWESNGQPENNYKTTPPVLDSDGSFFLYSKLTVDKSRWQQGNVFSCSVMHEALHNHYTQKSLSLSPGK

SEQ ID NO: 126 - protein, 214 aa, Artificial Sequence; identical to SEQ ID NO: 87
  XENP13544 Anti-CD38

SEQ ID NO: 127 - protein, 445 aa, Artificial Sequence; identical to SEQ ID NO: 82
  XENP13694 Anti-CD38

SEQ ID NO: 128 - protein, 485 aa, Artificial Sequence; identical to SEQ ID NO: 125
  XENP13694 Anti-CD38

SEQ ID NO: 129 - protein, 214 aa, Artificial Sequence; identical to SEQ ID NO: 84
  XENP13694 Anti-CD38

SEQ ID NO: 130 - protein, 207 aa, Artificial Sequence
  CD3E HUMAN Tcell
MQSGTHWRVLGLCLLSVGVWGQDGNEEMGGITQTPYKVSISGTTVILTCPQYPGSEILWQHNDKNIGGDEDDKNIGSDEDHLSLKEFSELEQSGYYVCYPRGSKPEDANFYLYLRARVCENCMEMDVMSVATIVIVDICITGGLLLLVYYWSKNRKAKAKPVTRGAGAGGRQRGQNKERPPPVPNPDYEPIRKGQRDLYSGLNQRRI

SEQ ID NO: 131 - protein, 300 aa, Artificial Sequence
  Human CD38 sequence
MANCEFSPVSGDKPCCRLSRRAQLCLGVSILVLILVVVLAVVVPRWRQQWSGPGTTKRFPETVLARCVKYTEIHPEMRHVDCQSVWDAFKGAFISKHPCNITEEDYQPLMKLGTQTVPCNKILLWSRIKDLAHQFTQVQRDMFTLEDTLLGYLADDLTWCGEFNTSKINYQSCPDWRKDCSNNPVSVFWKTVSRRFAEAACDVVHVMLNGSRSKIFDKNSTFGSVEVHNLQPEKVQTLEAWVIHGGREDSRDLCQDPTIKELESIISKRNIQFSCKNIYRPDKFLQCVKNPEDSSCTSEI

SEQ ID NO: 132 - protein, 258 aa, Artificial Sequence
  ECD domain
VPRWRQQWSGPGTTKRFPETVLARCVKYTEIHPEMRHVDCQSVWDAFKGAFISKHPCNITEEDYQPLMKLGTQTVPCNKILLWSRIKDLAHQFTQVQRDMFTLEDTLLGYLADDLTWCGEFNTSKINYQSCPDWRKDCSNNPVSVFWKTVSRRFAEAACDVVHVMLNGSRSKIFDKNSTFGSVEVHNLQPEKVQTLEAWVIHGGREDSRDLCQDPTIKELESIISKRNIQFSCKNIYRPDKFLQCVKNPEDSSCTSEI

SEQ ID NO: 133 - protein, 15 aa, Artificial Sequence
  Positive charged scFv linkers
GGGGSGGGGSGGGGS

SEQ ID NO: 134 - protein, 18 aa, Artificial Sequence
  Positive charged scFv linkers
GSTSGSGKPGSGEGSTKG

SEQ ID NO: 135 - protein, 14 aa, Artificial Sequence
  Positive charged scFv linkers
IRPRAIGGSKPRVA

SEQ ID NO: 136 - protein, 15 aa, Artificial Sequence
  Positive charged scFv linkers
GKGGSGKGGSGKGGS

SEQ ID NO: 137 - protein, 15 aa, Artificial Sequence
  Positive charged scFv linkers
GGKGSGGKGSGGKGS

SEQ ID NO: 138 - protein, 15 aa, Artificial Sequence
  Positive charged scFv linkers
GGGKSGGGKSGGGKS

SEQ ID NO: 139 - protein, 15 aa, Artificial Sequence
  Positive charged scFv linkers
GKGKSGKGKSGKGKS

SEQ ID NO: 140 - protein, 15 aa, Artificial Sequence
  Positive charged scFv linkers
GGGKSGGKGSGKGGS

SEQ ID NO: 141 - protein, 15 aa, Artificial Sequence
  Positive charged scFv linkers
GKPGSGKPGSGKPGS

SEQ ID NO: 142 - protein, 20 aa, Artificial Sequence
  Positive charged scFv linkers
GKPGSGKPGSGKPGSGKPGS

SEQ ID NO: 143 - protein, 20 aa, Artificial Sequence
  Positive charged scFv linkers
GKGKSGKGKSGKGKSGKGKS

SEQ ID NO: 144 - protein, 20 aa, Artificial Sequence
  Negative charged scFv linkers
GGGGSGGGGSGGGGSGGGGS

SEQ ID NO: 145 - protein, 14 aa, Artificial Sequence
  Negative charged scFv linkers
STAGDTHLGGEDFD

SEQ ID NO: 146 - protein, 15 aa, Artificial Sequence
  Negative charged scFv linkers
GEGGSGEGGSGEGGS

SEQ ID NO: 147 - protein, 15 aa, Artificial Sequence
  Negative charged scFv linkers
GGEGSGGEGSGGEGS

SEQ ID NO: 148 - protein, 15 aa, Artificial Sequence
  Negative charged scFv linkers
GGGESGGGESGGGES

SEQ ID NO: 149 - protein, 15 aa, Artificial Sequence
  Negative charged scFv linkers
GEGESGEGESGEGES

SEQ ID NO: 150 - protein, 15 aa, Artificial Sequence
  Negative charged scFv linkers
GGGESGGEGSGEGGS

SEQ ID NO: 151 - protein, 20 aa, Artificial Sequence
  Negative charged scFv linkers
GEGESGEGESGEGESGEGES

SEQ ID NO: 152 - protein, 15 aa, Artificial Sequence
  scFv Linkers
GGGGSGGGGSGGGGS

SEQ ID NO: 153 - protein, 20 aa, Artificial Sequence
  scFv Linkers
GGGGSGGGGSGGGGSGGGGS

SEQ ID NO: 154 - protein, 18 aa, Artificial Sequence
  scFv Linkers
GSTSGSGKPGSGEGSTKG

SEQ ID NO: 155 - protein, 19 aa, Artificial Sequence
  scFv Linkers
PRGASKSGSASQTGSAPGS

SEQ ID NO: 156 - protein, 19 aa, Artificial Sequence
  scFv Linkers
GTAAAGAGAAGGAAAGAAG

SEQ ID NO: 157 - protein, 19 aa, Artificial Sequence
  scFv Linkers
GTSGSSGSGSGGSGSGGGG

SEQ ID NO: 158 - protein, 20 aa, Artificial Sequence
  scFv Linkers
GKPGSGKPGSGKPGSGKPGS

SEQ ID NO: 159 - protein, 445 aa, Artificial Sequence; identical to SEQ ID NO: 85
  XENP14419 Anti-CD38

SEQ ID NO: 160 - protein, 714 aa, Artificial Sequence
  XENP14419 Anti-CD38
EVQLVESGGGLVQPGGSLRLSCAASGFDFSRSWMNWVRQAPGKGLEWVSEINPDSSTINYATSVKGRFTISRDNSKNTLYLQMNSLRAEDTAVYYCARYGNWFPYWGQGTLVTVSSASTKGPSVFPLAPSSKSTSGGTAALGCLVKDYFPEPVTVSWNSGALTSGVHTFPAVLQSSGLYSLSSVVTVPSSSLGTQTYICNVNHKPSNTKVDKKVEPKSCDKTHTCPPCPAPPVAGPSVFLFPPKPKDTLMISRTPEVTCVVVDVKHEDPEVKFNWYVDGVEVHNAKTKPREEQYNSTYRVVSVLTVLHQDWLNGKEYKCKVSNKALPAPIEKTISKAKGQPREPQVYTLPPSREQMTKNQVKLTCLVKGFYPSDIAVEWESNGQPENNYKTTPPVLDSDGSFFLYSKLTVDKSRWQQGNVFSCSVMHEALHNHYTQKSLSLSPGKGGGGSGGGGSGGGGSEVQLVESGGGLVQPGGSLRLSCAASGFTFSTYAMNWVRQAPGKGLEWVGRIRSKYNNYATYYADSVKGRFTISRDDSKNTLYLQMNSLRAEDTAVYYCVRHGNFGDSYVSWFAYWGQGTLVTVSSGKPGSGKPGSGKPGSGKPGSQAVVTQEPSLTVSPGGTVTLTCGSSTGAVTTSNYANWVQQKPGKSPRGLIGGTNKRAPGVPARFSGSLLGGKAALTISGAQPEDEADYYCALWYSNHWVFGGGTKLTVL

SEQ ID NO: 161 - protein, 214 aa, Artificial Sequence; identical to SEQ ID NO: 87
  XENP14419 Anti-CD38

SEQ ID NO: 162 - protein, 585 aa, Artificial Sequence
  XENP14420 Anti-CD38
EVQLVESGGGLVQPGGSLRLSCAASGFDFSRSWMNWVRQAPGKGLEWVSEINPDSSTINYATSVKGRFTISRDNSKNTLYLQMNSLRAEDTAVYYCARYGNWFPYWGQGTLVTVSSASTKGPSVFPLAPSSKSTSGGTAALGCLVKDYFPEPVTVSWNSGALTSGVHTFPAVLQSSGLYSLSSVVTVPSSSLGTQTYICNVNHKPSDTKVDKKVEPKSCDKTHTCPPCPAPPVAGPSVFLFPPKPKDTLMISRTPEVTCVVVDVKHEDPEVKFNWYVDGVEVHNAKTKPREEEYNSTYRVVSVLTVLHQDWLNGKEYKCKVSNKALPAPIEKTISKAKGQPREPQVYTLPPSREEMTKNQVSLTCDVSGFYPSDIAVEWESDGQPENNYKTTPPVLDSDGSFFLYSKLTVDKSRWEQGDVFSCSVMHEALHNHYTQKSLSLSPGKGGGGSGGGGSGGGGSEVQLVESGGGLVQPGGSLRLSCAASGFTFSTYAMNWVRQAPGKGLEWVGRIRSKYNNYATYYADSVKGRFTISRDDSKNTLYLQMNSLRAEDTAVYYCVRHGNFGDSYVSWFAYWGQGTLVTVSS

SEQ ID NO: 163 - protein, 569 aa, Artificial Sequence
  XENP14420 Anti-CD38
EVQLVESGGGLVQPGGSLRLSCAASGFDFSRSWMNWVRQAPGKGLEWVSEINPDSSTINYATSVKGRFTISRDNSKNTLYLQMNSLRAEDTAVYYCARYGNWFPYWGQGTLVTVSSASTKGPSVFPLAPSSKSTSGGTAALGCLVKDYFPEPVTVSWNSGALTSGVHTFPAVLQSSGLYSLSSVVTVPSSSLGTQTYICNVNHKPSNTKVDKKVEPKSCDKTHTCPPCPAPPVAGPSVFLFPPKPKDTLMISRTPEVTCVVVDVKHEDPEVKFNWYVDGVEVHNAKTKPREEQYNSTYRVVSVLTVLHQDWLNGKEYKCKVSNKALPAPIEKTISKAKGQPREPQVYTLPPSREQMTKNQVKLTCLVKGFYPSDIAVEWESNGQPENNYKTTPPVLDSDGSFFLYSKLTVDKSRWQQGNVFSCSVMHEALHNHYTQKSLSLSPGKGGGGSGGGGSGGGGSQAVVTQEPSLTVSPGGTVTLTCGSSTGAVTTSNYANWVQQKPGKSPRGLIGGTNKRAPGVPARFSGSLLGGKAALTISGAQPEDEADYYCALWYSNHWVFGGGTKLTVL

SEQ ID NO: 164 - protein, 214 aa, Artificial Sequence; identical to SEQ ID NO: 87
  XENP14420 Anti-CD38

SEQ ID NO: 165 - protein, 445 aa, Artificial Sequence; identical to SEQ ID NO: 85
  XENP14421 Anti-CD38

SEQ ID NO: 166 - protein, 718 aa, Artificial Sequence
  XENP14421 Anti-CD38
EVQLVESGGGLVQPGGSLRLSCAASGFDFSRSWMNWVRQAPGKGLEWVSEINPDSSTINYATSVKGRFTISRDNSKNTLYLQMNSLRAEDTAVYYCARYGNWFPYWGQGTLVTVSSASTKGPSVFPLAPSSKSTSGGTAALGCLVKDYFPEPVTVSWNSGALTSGVHTFPAVLQSSGLYSLSSVVTVPSSSLGTQTYICNVNHKPSNTKVDKKVEPKSCGGGGSGGGGSEVQLVESGGGLVQPGGSLRLSCAASGFTFSTYAMNWVRQAPGKGLEWVGRIRSKYNNYATYYADSVKGRFTISRDDSKNTLYLQMNSLRAEDTAVYYCVRHGNFGDSYVSWFAYWGQGTLVTVSSGKPGSGKPGSGKPGSGKPGSQAVVTQEPSLTVSPGGTVTLTCGSSTGAVTTSNYANWVQQKPGKSPRGLIGGTNKRAPGVPARFSGSLLGGKAALTISGAQPEDEADYYCALWYSNHWVFGGGTKLTVLGGGGSGGGGSKTHTCPPCPAPPVAGPSVFLFPPKPKDTLMISRTPEVTCVVVDVKHEDPEVKFNWYVDGVEVHNAKTKPREEQYNSTYRVVSVLTVLHQDWLNGKEYKCKVSNKALPAPIEKTISKAKGQPREPQVYTLPPSREQMTKNQVKLTCLVKGFYPSDIAVEWESNGQPENNYKTTPPVLDSDGSFFLYSKLTVDKSRWQQGNVFSCSVMHEALHNHYTQKSLSLSPGK

SEQ ID NO: 167 - protein, 214 aa, Artificial Sequence; identical to SEQ ID NO: 87
  XENP14421 Anti-CD38

SEQ ID NO: 168 - protein, 231 aa, Artificial Sequence
  XENP14422 Anti-CD38
EPKSSDKTHTCPPCPAPPVAGPSVFLFPPKPKDTLMISRTPEVTCVVVDVKHEDPEVKFNWYVDGVEVHNAKTKPREEEYNSTYRVVSVLTVLHQDWLNGKEYKCKVSNKALPAPIEKTISKAKGQPREPQVYTLPPSREEMTKNQVSLTCDVSGFYPSDIAVEWESDGQPENNYKTTPPVLDSDGSFFLYSKLTVDKSRWEQGDVFSCSVMHEALHNHYTQKSLSLSPGK

SEQ ID NO: 169 - protein, 718 aa, Artificial Sequence; identical to SEQ ID NO: 166
  XENP14422 Anti-CD38

SEQ ID NO: 170 - protein, 214 aa, Artificial Sequence; identical to SEQ ID NO: 87
  XENP14422 Anti-CD38

SEQ ID NO: 171 - protein, 589 aa, Artificial Sequence
  XENP14423 Anti-CD38
EVQLVESGGGLVQPGGSLRLSCAASGFDFSRSWMNWVRQAPGKGLEWVSEINPDSSTINYATSVKGRFTISRDNSKNTLYLQMNSLRAEDTAVYYCARYGNWFPYWGQGTLVTVSSASTKGPSVFPLAPSSKSTSGGTAALGCLVKDYFPEPVTVSWNSGALTSGVHTFPAVLQSSGLYSLSSVVTVPSSSLGTQTYICNVNHKPSDTKVDKKVEPKSCGGGGSGGGGSEVQLVESGGGLVQPGGSLRLSCAASGFTFSTYAMNWVRQAPGKGLEWVGRIRSKYNNYATYYADSVKGRFTISRDDSKNTLYLQMNSLRAEDTAVYYCVRHGNFGDSYVSWFAYWGQGTLVTVSSGGGGSGGGGSKTHTCPPCPAPPVAGPSVFLFPPKPKDTLMISRTPEVTCVVVDVKHEDPEVKFNWYVDGVEVHNAKTKPREEEYNSTYRVVSVLTVLHQDWLNGKEYKCKVSNKALPAPIEKTISKAKGQPREPQVYTLPPSREEMTKNQVSLTCDVSGFYPSDIAVEWESDGQPENNYKTTPPVLDSDGSFFLYSKLTVDKSRWEQGDVFSCSVMHEALHNHYTQKSLSLSPGK

SEQ ID NO: 172 - protein, 573 aa, Artificial Sequence
  XENP14423 Anti-CD38
EVQLVESGGGLVQPGGSLRLSCAASGFDFSRSWMNWVRQAPGKGLEWVSEINPDSSTINYATSVKGRFTISRDNSKNTLYLQMNSLRAEDTAVYYCARYGNWFPYWGQGTLVTVSSASTKGPSVFPLAPSSKSTSGGTAALGCLVKDYFPEPVTVSWNSGALTSGVHTFPAVLQSSGLYSLSSVVTVPSSSLGTQTYICNVNHKPSNTKVDKKVEPKSCGGGGSGGGGSQAVVTQEPSLTVSPGGTVTLTCGSSTGAVTTSNYANWVQQKPGKSPRGLIGGTNKRAPGVPARFSGSLLGGKAALTISGAQPEDEADYYCALWYSNHWVFGGGTKLTVLGGGGSGGGGSKTHTCPPCPAPPVAGPSVFLFPPKPKDTLMISRTPEVTCVVVDVKHEDPEVKFNWYVDGVEVHNAKTKPREEQYNSTYRVVSVLTVLHQDWLNGKEYKCKVSNKALPAPIEKTISKAKGQPREPQVYTLPPSREQMTKNQVKLTCLVKGFYPSDIAVEWESNGQPENNYKTTPPVLDSDGSFFLYSKLTVDKSRWQQGNVFSCSVMHEALHNHYTQKSLSLSPGK

SEQ ID NO: 173 - protein, 214 aa, Artificial Sequence; identical to SEQ ID NO: 87
  XENP14423 Anti-CD38

SEQ ID NO: 174 - protein, 231 aa, Artificial Sequence; identical to SEQ ID NO: 168
  XENP15427 Anti-CD38

SEQ ID NO: 175 - protein, 714 aa, Artificial Sequence
  XENP15427 Anti-CD38
EVQLVESGGGLVQPGGSLRLSCAASGFDFSRSWMNWVRQAPGKGLEWVSEINPDSSTINYATSVKGRFTISRDNSKNTLYLQMNSLRAEDTAVYYCARYGNWFPYWGQGTLVTVSSASTKGPSVFPLAPSSKSTSGGTAALGCLVKDYFPEPVTVSWNSGALTSGVHTFPAVLQSSGLYSLSSVVTVPSSSLGTQTYICNVNHKPSNTKVDKKVEPKSCDKTHTCPPCPAPPVAGPSVFLFPPKPKDTLMISRTPEVTCVVVDVKHEDPEVKFNWYVDGVEVHNAKTKPREEQYNSTYRVVSVLTVLHQDWLNGKEYKCKVSNKALPAPIEKTISKAKGQPREPQVYTLPPSREQMTKNQVKLTCLVKGFYPSDIAVEWESNGQPENNYKTTPPVLDSDGSFFLYSKLTVDKSRWQQGNVFSCSVMHEALHNHYTQKSLSLSPGKGGGGSGGGGSGGGGSEVQLVESGGGLVQPGGSLRLSCAASGFTFSTYAMSWVRQAPGKGLEWVGRIRSKYNNYATYYADSVKGRFTISRDDSKNTLYLQMNSLRAEDTAVYYCVRHGNFGDSYVSWFAYWGQGTLVTVSSGKPGSGKPGSGKPGSGKPGSQAVVTQEPSLTVSPGGTVTLTCGSSTGAVTTSNYANWVQQKPGKSPRGLIGGTNKRAPGVPARFSGSLLGGKAALTISGAQPEDEADYYCALWYSNHWVFGGGTKLTVL

SEQ ID NO: 176 - protein, 214 aa, Artificial Sequence; identical to SEQ ID NO: 87
  XENP15427 Anti-CD38

SEQ ID NO: 177 - protein, 231 aa, Artificial Sequence; identical to SEQ ID NO: 168
  XENP15428 Anti-CD38

SEQ ID NO: 178 - protein, 714 aa, Artificial Sequence
  XENP15428 Anti-CD38
EVQLVESGGGLVQPGGSLRLSCAASGFDFSRSWMNWVRQAPGKGLEWVSEINPDSSTINYATSVKGRFTISRDNSKNTLYLQMNSLRAEDTAVYYCARYGNWFPYWGQGTLVTVSSASTKGPSVFPLAPSSKSTSGGTAALGCLVKDYFPEPVTVSWNSGALTSGVHTFPAVLQSSGLYSLSSVVTVPSSSLGTQTYICNVNHKPSNTKVDKKVEPKSCDKTHTCPPCPAPPVAGPSVFLFPPKPKDTLMISRTPEVTCVVVDVKHEDPEVKFNWYVDGVEVHNAKTKPREEQYNSTYRVVSVLTVLHQDWLNGKEYKCKVSNKALPAPIEKTISKAKGQPREPQVYTLPPSREQMTKNQVKLTCLVKGFYPSDIAVEWESNGQPENNYKTTPPVLDSDGSFFLYSKLTVDKSRWQQGNVFSCSVMHEALHNHYTQKSLSLSPGKGGGGSGGGGSGGGGSEVQLVESGGGLVQPGGSLRLSCAASGFTFSTYAMNWVRQAPGKGLEWVGRIRSKYNNYATYYADSVKGRFTISRDDSKNTLYLQMNSLRAEDTAVYYCVRHGNFGDSYVSWFDYWGQGTLVTVSSGKPGSGKPGSGKPGSGKPGSQAVVTQEPSLTVSPGGTVTLTCGSSTGAVTTSNYANWVQQKPGKSPRGLIGGTNKRAPGVPARFSGSLLGGKAALTISGAQPEDEADYYCALWYSNHWVFGGGTKLTVL

SEQ ID NO: 179 - protein, 214 aa, Artificial Sequence; identical to SEQ ID NO: 87
  XENP15428 Anti-CD38

SEQ ID NO: 180 - protein, 231 aa, Artificial Sequence; identical to SEQ ID NO: 168
  XENP15429 Anti-CD38

SEQ ID NO: 181 - protein, 714 aa, Artificial Sequence; identical to SEQ ID NO: 160
  XENP15429 Anti-CD38

SEQ ID NO: 182 - protein, 214 aa, Artificial Sequence; identical to SEQ ID NO: 87
  XENP15429 Anti-CD38

SEQ ID NO: 183 - protein, 231 aa, Artificial Sequence; identical to SEQ ID NO: 168
  XENP15430 Anti-CD38

SEQ ID NO: 184 - protein, 718 aa, Artificial Sequence
  XENP15430 Anti-CD38
EVQLVESGGGLVQPGGSLRLSCAASGFDFSRSWMNWVRQAPGKGLEWVSEINPDSSTINYATSVKGRFTISRDNSKNTLYLQMNSLRAEDTAVYYCARYGNWFPYWGQGTLVTVSSASTKGPSVFPLAPSSKSTSGGTAALGCLVKDYFPEPVTVSWNSGALTSGVHTFPAVLQSSGLYSLSSVVTVPSSSLGTQTYICNVNHKPSNTKVDKKVEPKSCGGGGSGGGGSEVQLVESGGGLVQPGGSLRLSCAASGFTFSTYAMSWVRQAPGKGLEWVGRIRSKYNNYATYYADSVKGRFTISRDDSKNTLYLQMNSLRAEDTAVYYCVRHGNFGDSYVSWFAYWGQGTLVTVSSGKPGSGKPGSGKPGSGKPGSQAVVTQEPSLTVSPGGTVTLTCGSSTGAVTTSNYANWVQQKPGKSPRGLIGGTNKRAPGVPARFSGSLLGGKAALTISGAQPEDEADYYCALWYSNHWVFGGGTKLTVLGGGGSGGGGSKTHTCPPCPAPPVAGPSVFLFPPKPKDTLMISRTPEVTCVVVDVKHEDPEVKFNWYVDGVEVHNAKTKPREEQYNSTYRVVSVLTVLHQDWLNGKEYKCKVSNKALPAPIEKTISKAKGQPREPQVYTLPPSREQMTKNQVKLTCLVKGFYPSDIAVEWESNGQPENNYKTTPPVLDSDGSFFLYSKLTVDKSRWQQGNVFSCSVMHEALHNHYTQKSLSLSPGK

SEQ ID NO: 185 - protein, 214 aa, Artificial Sequence; identical to SEQ ID NO: 87
  XENP15430 Anti-CD38

SEQ ID NO: 186 - protein, 231 aa, Artificial Sequence; identical to SEQ ID NO: 168
  XENP15431 Anti-CD38

SEQ ID NO: 187 - protein, 718 aa, Artificial Sequence; identical to SEQ ID NO: 184
  XENP15431 Anti-CD38

SEQ ID NO: 188 - protein, 214 aa, Artificial Sequence; identical to SEQ ID NO: 87
  XENP15431 Anti-CD38

SEQ ID NO: 189 - protein, 231 aa, Artificial Sequence; identical to SEQ ID NO: 168
  XENP15432 Anti-CD38

SEQ ID NO: 190 - protein, 718 aa, Artificial Sequence; identical to SEQ ID NO: 166
  XENP15432 Anti-CD38

SEQ ID NO: 191 - protein, 214 aa, Artificial Sequence; identical to SEQ ID NO: 87
  XENP15432 Anti-CD38

SEQ ID NO: 192 - protein, 445 aa, Artificial Sequence; identical to SEQ ID NO: 85
  XENP15433 Anti-CD38

SEQ ID NO: 193 - protein, 714 aa, Artificial Sequence; identical to SEQ ID NO: 175
  XENP15433 Anti-CD38

SEQ ID NO: 194 - protein, 214 aa, Artificial Sequence; identical to SEQ ID NO: 87
  XENP15433 Anti-CD38

SEQ ID NO: 195 - protein, 445 aa, Artificial Sequence; identical to SEQ ID NO: 85
  XENP15434 Anti-CD38

SEQ ID NO: 196 - protein, 714 aa, Artificial Sequence; identical to SEQ ID NO: 178
  XENP15434 Anti-CD38

SEQ ID NO: 197 - protein, 214 aa, Artificial Sequence; identical to SEQ ID NO: 87
  XENP15434 Anti-CD38

SEQ ID NO: 198 - protein, 445 aa, Artificial Sequence; identical to SEQ ID NO: 85
  XENP15435 Anti-CD38

SEQ ID NO: 199 - protein, 714 aa, Artificial Sequence; identical to SEQ ID NO: 160
  XENP15435 Anti-CD38

SEQ ID NO: 200 - protein, 214 aa, Artificial Sequence; identical to SEQ ID NO: 87
  XENP15435 Anti-CD38

SEQ ID NO: 201 - protein, 445 aa, Artificial Sequence; identical to SEQ ID NO: 85
  XENP15436 Anti-CD38

SEQ ID NO: 202 - protein, 718 aa, Artificial Sequence; identical to SEQ ID NO: 184
  XENP15436 Anti-CD38

SEQ ID NO: 203 - protein, 214 aa, Artificial Sequence; identical to SEQ ID NO: 87
  XENP15436 Anti-CD38

SEQ ID NO: 204 - protein, 445 aa, Artificial Sequence; identical to SEQ ID NO: 85
  XENP15437 Anti-CD38

SEQ ID NO: 205 - protein, 718 aa, Artificial Sequence; identical to SEQ ID NO: 184
  XENP15437 Anti-CD38

SEQ ID NO: 206 - protein, 214 aa, Artificial Sequence; identical to SEQ ID NO: 87
  XENP15437 Anti-CD38

SEQ ID NO: 207 - protein, 445 aa, Artificial Sequence; identical to SEQ ID NO: 85
  XENP15438 Anti-CD38

SEQ ID NO: 208 - protein, 718 aa, Artificial Sequence; identical to SEQ ID NO: 166
  XENP15438 Anti-CD38

SEQ ID NO: 209 - protein, 214 aa, Artificial Sequence; identical to SEQ ID NO: 87
  XENP15438 Anti-CD38

SEQ ID NO: 210 - protein, 262 aa, Artificial Sequence
  anti-CD3 sequences
EVQLVESGGGLVQPGGSLRLSCAASGFTFSTYAMNWVRQAPGKGLEWVGRIRSKYNNYATYYADSVKGRFTISRDDSKNTLYLQMNSLRAEDTAVYYCVRHGNFGDSYVSWFAYWGQGTLVTVSSGKPGSGKPGSGKPGSGKPGSQAVVTQEPSLTVSPGGTVTLTCGSSTGAVTTSNYANWVQQKPGKSPRGLIGGTNKRAPGVPARFSGSLLGGKAALTISGAQPEDEADYYCALWYSNHWVFGGGTKLTVLGSHHHHHH

SEQ ID NO: 211 - protein, 254 aa, Artificial Sequence; identical to SEQ ID NO: 9
  anti-CD3 sequences

SEQ ID NO: 212 - protein, 125 aa, Artificial Sequence; identical to SEQ ID NO: 1
  anti-CD3 sequences

SEQ ID NO: 213 - protein, 109 aa, Artificial Sequence; identical to SEQ ID NO: 5
  anti-CD3 sequences

SEQ ID NO: 214 - protein, 262 aa, Artificial Sequence; identical to SEQ ID NO: 210
  anti-CD3 sequences

SEQ ID NO: 215 - protein, 254 aa, Artificial Sequence; identical to SEQ ID NO: 9
  anti-CD3 sequences

SEQ ID NO: 216 - protein, 125 aa, Artificial Sequence; identical to SEQ ID NO: 1
  anti-CD3 sequences

SEQ ID NO: 217 - protein, 109 aa, Artificial Sequence; identical to SEQ ID NO: 5
  anti-CD3 sequences

SEQ ID NO: 218 - protein, 262 aa, Artificial Sequence
  anti-CD3 sequences
EVQLVESGGGLVQPGGSLRLSCAASGFTFSTYAMNWVRQAPGKGLEWVGRIRSKYNNYATYYADSVKGRFTISRDDSKNTLYLQMNSLRAEDTAVYYCVRHGNFGDSYVSWFDYWGQGTLVTVSSGKPGSGKPGSGKPGSGKPGSQAVVTQEPSLTVSPGGTVTLTCGSSTGAVTTSNYANWVQQKPGKSPRGLIGGTNKRAPGVPARFSGSLLGGKAALTISGAQPEDEADYYCALWYSNHWVFGGGTKLTVLGSHHHHHH

SEQ ID NO: 219 - protein, 254 aa, Artificial Sequence; identical to SEQ ID NO: 45
  anti-CD3 sequences

SEQ ID NO: 220 - protein, 125 aa, Artificial Sequence; identical to SEQ ID NO: 37
  anti-CD3 sequences

SEQ ID NO: 221 - protein, 109 aa, Artificial Sequence; identical to SEQ ID NO: 5
  anti-CD3 sequences

SEQ ID NO: 222 - protein, 262 aa, Artificial Sequence
  anti-CD3 sequences
EVQLVESGGGLVQPGGSLRLSCAASGFTFSTYAMSWVRQAPGKGLEWVGRIRSKYNNYATYYADSVKGRFTISRDDSKNTLYLQMNSLRAEDTAVYYCVRHGNFGDSYVSWFAYWGQGTLVTVSSGKPGSGKPGSGKPGSGKPGSQAVVTQEPSLTVSPGGTVTLTCGSSTGAVTTSNYANWVQQKPGKSPRGLIGGTNKRAPGVPARFSGSLLGGKAALTISGAQPEDEADYYCALWYSNHWVFGGGTKLTVLGSHHHHHH

SEQ ID NO: 223 - protein, 254 aa, Artificial Sequence; identical to SEQ ID NO: 54
  anti-CD3 sequences

SEQ ID NO: 224 - protein, 125 aa, Artificial Sequence; identical to SEQ ID NO: 46
  anti-CD3 sequences

SEQ ID NO: 225 - protein, 109 aa, Artificial Sequence; identical to SEQ ID NO: 5
  anti-CD3 sequences

SEQ ID NO: 226 - protein, 262 aa, Artificial Sequence
  anti-CD3 sequences
EVQLVESGGGLVQPGGSLRLSCAASGFTFSTYAMNWVRQAPGKGLEWVGRIRSKANNYATYYADSVKGRFTISRDDSKNTLYLQMNSLRAEDTAVYYCVRHGNFGDSYVSWFAYWGQGTLVTVSSGKPGSGKPGSGKPGSGKPGSQAVVTQEPSLTVSPGGTVTLTCGSSTGAVTTSNYANWVQQKPGKSPRGLIGGTNKRAPGVPARFSGSLLGGKAALTISGAQPEDEADYYCALWYSNHWVFGGGTKLTVLGSHHHHHH

SEQ ID NO: 227 - protein, 254 aa, Artificial Sequence; identical to SEQ ID NO: 18
  anti-CD3 sequences

SEQ ID NO: 228 - protein, 125 aa, Artificial Sequence; identical to SEQ ID NO: 10
  anti-CD3 sequences

SEQ ID NO: 229 - protein, 109 aa, Artificial Sequence; identical to SEQ ID NO: 5
  anti-CD3 sequences

SEQ ID NO: 230 - protein, 262 aa, Artificial Sequence
  anti-CD3 sequences
EVQLVESGGGLVQPGGSLRLSCAASGFTFSTYAMNWVRQAPGKGLEWVGRIRSKYNNYATYYADSVKGRFTISRDDSKNTLYLQMNSLRAEDTAVYYCVRHGNFGPSYVSWFAYWGQGTLVTVSSGKPGSGKPGSGKPGSGKPGSQAVVTQEPSLTVSPGGTVTLTCGSSTGAVTTSNYANWVQQKPGKSPRGLIGGTNKRAPGVPARFSGSLLGGKAALTISGAQPEDEADYYCALWYSNHWVFGGGTKLTVLGSHHHHHH

SEQ ID NO: 231 - protein, 254 aa, Artificial Sequence
  anti-CD3 sequences
EVQLVESGGGLVQPGGSLRLSCAASGFTFSTYAMNWVRQAPGKGLEWVGRIRSKYNNYATYYADSVKGRFTISRDDSKNTLYLQMNSLRAEDTAVYYCVRHGNFGPSYVSWFAYWGQGTLVTVSSGKPGSGKPGSGKPGSGKPGSQAVVTQEPSLTVSPGGTVTLTCGSSTGAVTTSNYANWVQQKPGKSPRGLIGGTNKRAPGVPARFSGSLLGGKAALTISGAQPEDEADYYCALWYSNHWVFGGGTKLTVL

SEQ ID NO: 232 - protein, 125 aa, Artificial Sequence
  anti-CD3 sequences
EVQLVESGGGLVQPGGSLRLSCAASGFTFSTYAMNWVRQAPGKGLEWVGRIRSKYNNYATYYADSVKGRFTISRDDSKNTLYLQMNSLRAEDTAVYYCVRHGNFGPSYVSWFAYWGQGTLVTVSS

SEQ ID NO: 233 - protein, 109 aa, Artificial Sequence; identical to SEQ ID NO: 5
  anti-CD3 sequences

SEQ ID NO: 234 - protein, 262 aa, Artificial Sequence
  anti-CD3 sequences
EVQLVESGGGLVQPGGSLRLSCAASGFTFSTYAMNWVRQAPGKGLEWVGRIRSKYNNYATYYADSVKGRFTISRDDSKNTLYLQMNSLRAEDTAVYYCVRHGNFGDEYVSWFAYWGQGTLVTVSSGKPGSGKPGSGKPGSGKPGSQAVVTQEPSLTVSPGGTVTLTCGSSTGAVTTSNYANWVQQKPGKSPRGLIGGTNKRAPGVPARFSGSLLGGKAALTISGAQPEDEADYYCALWYSNHWVFGGGTKLTVLGSHHHHHH

SEQ ID NO: 235 - protein, 254 aa, Artificial Sequence; identical to SEQ ID NO: 27
  anti-CD3 sequences

SEQ ID NO: 236 - protein, 125 aa, Artificial Sequence; identical to SEQ ID NO: 19
  anti-CD3 sequences

SEQ ID NO: 237 - protein, 109 aa, Artificial Sequence; identical to SEQ ID NO: 5
  anti-CD3 sequences

SEQ ID NO: 238 - protein, 262 aa, Artificial Sequence
  anti-CD3 sequences
EVQLVESGGGLVQPGGSLRLSCAASGFTFSTYAMNWVRQAPGKGLEWVGRIRSKYNNYATYYADSVKGRFTISRDDSKNTLYLQMNSLRAEDTAVYYCVRHGNFGDPYVSWFAYWGQGTLVTVSSGKPGSGKPGSGKPGSGKPGSQAVVTQEPSLTVSPGGTVTLTCGSSTGAVTTSNYANWVQQKPGKSPRGLIGGTNKRAPGVPARFSGSLLGGKAALTISGAQPEDEADYYCALWYSNHWVFGGGTKLTVLGSHHHHHH

SEQ ID NO: 239 - protein, 254 aa, Artificial Sequence; identical to SEQ ID NO: 36
  anti-CD3 sequences

SEQ ID NO: 240 - protein, 125 aa, Artificial Sequence; identical to SEQ ID NO: 28
  anti-CD3 sequences

SEQ ID NO: 241 - protein, 109 aa, Artificial Sequence; identical to SEQ ID NO: 5
  anti-CD3 sequences

SEQ ID NO: 242 - protein, 262 aa, Artificial Sequence; identical to SEQ ID NO: 226
  anti-CD3 sequences

SEQ ID NO: 243 - protein, 254 aa, Artificial Sequence; identical to SEQ ID NO: 18
  anti-CD3 sequences

SEQ ID NO: 244 - protein, 125 aa, Artificial Sequence; identical to SEQ ID NO: 10
  anti-CD3 sequences

SEQ ID NO: 245 - protein, 109 aa, Artificial Sequence; identical to SEQ ID NO: 5
  anti-CD3 sequences

SEQ ID NO: 246 - protein, 262 aa, Artificial Sequence
  anti-CD3 sequences
EVQLVESGGGLVQPGGSLRLSCAASGFTFSTYAMNWVRQAPGKGLEWVGRIRSKYNNYATAYADSVKGRFTISRDDSKNTLYLQMNSLRAEDTAVYYCVRHGNFGDSYVSWFAYWGQGTLVTVSSGKPGSGKPGSGKPGSGKPGSQAVVTQEPSLTVSPGGTVTLTCGSSTGAVTTSNYANWVQQKPGKSPRGLIGGTNKRAPGVPARFSGSLLGGKAALTISGAQPEDEADYYCALWYSNHWVFGGGTKLTVLGSHHHHHH

SEQ ID NO: 247 - protein, 254 aa, Artificial Sequence
  anti-CD3 sequences
EVQLVESGGGLVQPGGSLRLSCAASGFTFSTYAMNWVRQAPGKGLEWVGRIRSKYNNYATAYADSVKGRFTISRDDSKNTLYLQMNSLRAEDTAVYYCVRHGNFGDSYVSWFAYWGQGTLVTVSSGKPGSGKPGSGKPGSGKPGSQAVVTQEPSLTVSPGGTVTLTCGSSTGAVTTSNYANWVQQKPGKSPRGLIGGTNKRAPGVPARFSGSLLGGKAALTISGAQPEDEADYYCALWYSNHWVFGGGTKLTVL

SEQ ID NO: 248 - protein, 125 aa, Artificial Sequence
  anti-CD3 sequences
EVQLVESGGGLVQPGGSLRLSCAASGFTFSTYAMNWVRQAPGKGLEWVGRIRSKYNNYATAYADSVKGRFTISRDDSKNTLYLQMNSLRAEDTAVYYCVRHGNFGDSYVSWFAYWGQGTLVTVSS

SEQ ID NO: 249 - protein, 109 aa, Artificial Sequence; identical to SEQ ID NO: 5
  anti-CD3 sequences

SEQ ID NO: 250 - protein, 262 aa, Artificial Sequence
  anti-CD3 sequences
EVQLVESGGGLVQPGGSLRLSCAASGFTFSTYAMNWVRQAPGKGLEWVGRIRSKYNNYATYYADSVKGRFTISRDDSKNTLYLQMNSLRAEDTAVYYCVRHGNFGESYVSWFAYWGQGTLVTVSSGKPGSGKPGSGKPGSGKPGSQAVVTQEPSLTVSPGGTVTLTCGSSTGAVTTSNYANWVQQKPGKSPRGLIGGTNKRAPGVPARFSGSLLGGKAALTISGAQPEDEADYYCALWYSNHWVFGGGTKLTVLGSHHHHHH

SEQ ID NO: 251 - protein, 254 aa, Artificial Sequence
  anti-CD3 sequences
EVQLVESGGGLVQPGGSLRLSCAASGFTFSTYAMNWVRQAPGKGLEWVGRIRSKYNNYATYYADSVKGRFTISRDDSKNTLYLQMNSLRAEDTAVYYCVRHGNFGESYVSWFAYWGQGTLVTVSSGKPGSGKPGSGKPGSGKPGSQAVVTQEPSLTVSPGGTVTLTCGSSTGAVTTSNYANWVQQKPGKSPRGLIGGTNKRAPGVPARFSGSLLGGKAALTISGAQPEDEADYYCALWYSNHWVFGGGTKLTVL

SEQ ID NO: 252 - protein, 125 aa, Artificial Sequence
  anti-CD3 sequences
EVQLVESGGGLVQPGGSLRLSCAASGFTFSTYAMNWVRQAPGKGLEWVGRIRSKYNNYATYYADSVKGRFTISRDDSKNTLYLQMNSLRAEDTAVYYCVRHGNFGESYVSWFAYWGQGTLVTVSS

SEQ ID NO: 253 - protein, 109 aa, Artificial Sequence; identical to SEQ ID NO: 5
  anti-CD3 sequences

SEQ ID NO: 254 - protein, 262 aa, Artificial Sequence
  anti-CD3 sequences
EVQLVESGGGLVQPGGSLRLSCAASGFTFSTYAMNWVRQAPGKGLEWVGRIRSKYNNYATYYADSVKGRFTISRDDSKNTLYLQMNSLRAEDTAVYYCVRHGNFGQSYVSWFAYWGQGTLVTVSSGKPGSGKPGSGKPGSGKPGSQAVVTQEPSLTVSPGGTVTLTCGSSTGAVTTSNYANWVQQKPGKSPRGLIGGTNKRAPGVPARFSGSLLGGKAALTISGAQPEDEADYYCALWYSNHWVFGGGTKLTVLGSHHHHHH

SEQ ID NO: 255 - protein, 254 aa, Artificial Sequence
  anti-CD3 sequences
EVQLVESGGGLVQPGGSLRLSCAASGFTFSTYAMNWVRQAPGKGLEWVGRIRSKYNNYATYYADSVKGRFTISRDDSKNTLYLQMNSLRAEDTAVYYCVRHGNFGQSYVSWFAYWGQGTLVTVSSGKPGSGKPGSGKPGSGKPGSQAVVTQEPSLTVSPGGTVTLTCGSSTGAVTTSNYANWVQQKPGKSPRGLIGGTNKRAPGVPARFSGSLLGGKAALTISGAQPEDEADYYCALWYSNHWVFGGGTKLTVL

SEQ ID NO: 256 - protein, 125 aa, Artificial Sequence
  anti-CD3 sequences
EVQLVESGGGLVQPGGSLRLSCAASGFTFSTYAMNWVRQAPGKGLEWVGRIRSKYNNYATYYADSVKGRFTISRDDSKNTLYLQMNSLRAEDTAVYYCVRHGNFGQSYVSWFAYWGQGTLVTVSS

SEQ ID NO: 257 - protein, 109 aa, Artificial Sequence; identical to SEQ ID NO: 5
  anti-CD3 sequences

SEQ ID NO: 258 - protein, 262 aa, Artificial Sequence
  anti-CD3 sequences
EVQLVESGGGLVQPGGSLRLSCAASGFTFSTYAMNWVRQAPGKGLEWVGRIRSKYNNYATYYADSVKGRFTISRDDSKNTLYLQMNSLRAEDTAVYYCVRHGNFGDNYVSWFAYWGQGTLVTVSSGKPGSGKPGSGKPGSGKPGSQAVVTQEPSLTVSPGGTVTLTCGSSTGAVTTSNYANWVQQKPGKSPRGLIGGTNKRAPGVPARFSGSLLGGKAALTISGAQPEDEADYYCALWYSNHWVFGGGTKLTVLGSHHHHHH

SEQ ID NO: 259 - protein, 254 aa, Artificial Sequence
  anti-CD3 sequences
EVQLVESGGGLVQPGGSLRLSCAASGFTFSTYAMNWVRQAPGKGLEWVGRIRSKYNNYATYYADSVKGRFTISRDDSKNTLYLQMNSLRAEDTAVYYCVRHGNFGDNYVSWFAYWGQGTLVTVSSGKPGSGKPGSGKPGSGKPGSQAVVTQEPSLTVSPGGTVTLTCGSSTGAVTTSNYANWVQQKPGKSPRGLIGGTNKRAPGVPARFSGSLLGGKAALTISGAQPEDEADYYCALWYSNHWVFGGGTKLTVL

SEQ ID NO: 260 - protein, 125 aa, Artificial Sequence
  anti-CD3 sequences
EVQLVESGGGLVQPGGSLRLSCAASGFTFSTYAMNWVRQAPGKGLEWVGRIRSKYNNYATYYADSVKGRFTISRDDSKNTLYLQMNSLRAEDTAVYYCVRHGNFGDNYVSWFAYWGQGTLVTVSS

SEQ ID NO: 261 - protein, 109 aa, Artificial Sequence; identical to SEQ ID NO: 5
  anti-CD3 sequences

SEQ ID NO: 262 - protein, 262 aa, Artificial Sequence
  anti-CD3 sequences
EVQLVESGGGLVQPGGSLRLSCAASGFTFSTYAMNWVRQAPGKGLEWVGRIRSKYNNYATYYADSVKGRFTISRDDSKNTLYLQMNSLRAEDTAVYYCVRHGNFGDQYVSWFAYWGQGTLVTVSSGKPGSGKPGSGKPGSGKPGSQAVVTQEPSLTVSPGGTVTLTCGSSTGAVTTSNYANWVQQKPGKSPRGLIGGTNKRAPGVPARFSGSLLGGKAALTISGAQPEDEADYYCALWYSNHWVFGGGTKLTVLGSHHHHHH

SEQ ID NO: 263 - protein, 254 aa, Artificial Sequence
  anti-CD3 sequences
EVQLVESGGGLVQPGGSLRLSCAASGFTFSTYAMNWVRQAPGKGLEWVGRIRSKYNNYATYYADSVKGRFTISRDDSKNTLYLQMNSLRAEDTAVYYCVRHGNFGDQYVSWFAYWGQGTLVTVSSGKPGSGKPGSGKPGSGKPGSQAVVTQEPSLTVSPGGTVTLTCGSSTGAVTTSNYANWVQQKPGKSPRGLIGGTNKRAPGVPARFSGSLLGGKAALTISGAQPEDEADYYCALWYSNHWVFGGGTKLTVL

SEQ ID NO: 264 - protein, 125 aa, Artificial Sequence
  anti-CD3 sequences
EVQLVESGGGLVQPGGSLRLSCAASGFTFSTYAMNWVRQAPGKGLEWVGRIRSKYNNYATYYADSVKGRFTISRDDSKNTLYLQMNSLRAEDTAVYYCVRHGNFGDQYVSWFAYWGQGTLVTVSS

SEQ ID NO: 265 - protein, 109 aa, Artificial Sequence; identical to SEQ ID NO: 5
  anti-CD3 sequences

SEQ ID NO: 266 - protein, 262 aa, Artificial Sequence
  anti-CD3 sequences
EVQLVESGGGLVQPGGSLRLSCAASGFTFSTYAMNWVRQAPGKGLEWVGRIRSKANNYATYYADSVKGRFTISRDDSKNTLYLQMNSLRAEDTAVYYCVRHGNFGDSYVSWFDYWGQGTLVTVSSGKPGSGKPGSGKPGSGKPGSQAVVTQEPSLTVSPGGTVTLTCGSSTGAVTTSNYANWVQQKPGKSPRGLIGGTNKRAPGVPARFSGSLLGGKAALTISGAQPEDEADYYCALWYSNHWVFGGGTKLTVLGSHHHHHH

SEQ ID NO: 267 - protein, 254 aa, Artificial Sequence
  anti-CD3 sequences
EVQLVESGGGLVQPGGSLRLSCAASGFTFSTYAMNWVRQAPGKGLEWVGRIRSKANNYATYYADSVKGRFTISRDDSKNTLYLQMNSLRAEDTAVYYCVRHGNFGDSYVSWFDYWGQGTLVTVSSGKPGSGKPGSGKPGSGKPGSQAVVTQEPSLTVSPGGTVTLTCGSSTGAVTTSNYANWVQQKPGKSPRGLIGGTNKRAPGVPARFSGSLLGGKAALTISGAQPEDEADYYCALWYSNHWVFGGGTKLTVL

SEQ ID NO: 268 - protein, 125 aa, Artificial Sequence
  anti-CD3 sequences
EVQLVESGGGLVQPGGSLRLSCAASGFTFSTYAMNWVRQAPGKGLEWVGRIRSKANNYATYYADSVKGRFTISRDDSKNTLYLQMNSLRAEDTAVYYCVRHGNFGDSYVSWFDYWGQGTLVTVSS

SEQ ID NO: 269 - protein, 109 aa, Artificial Sequence; identical to SEQ ID NO: 5
  anti-CD3 sequences

SEQ ID NO: 270 - protein, 262 aa, Artificial Sequence
  anti-CD3 sequences
EVQLVESGGGLVQPGGSLRLSCAASGFTFSTYAMNWVRQAPGKGLEWVGRIRSKYNNYATAYADSVKGRFTISRDDSKNTLYLQMNSLRAEDTAVYYCVRHGNFGDSYVSWFDYWGQGTLVTVSSGKPGSGKPGSGKPGSGKPGSQAVVTQEPSLTVSPGGTVTLTCGSSTGAVTTSNYANWVQQKPGKSPRGLIGGTNKRAPGVPARFSGSLLGGKAALTISGAQPEDEADYYCALWYSNHWVFGGGTKLTVLGSHHHHHH

SEQ ID NO: 271 - protein, 254 aa, Artificial Sequence
  anti-CD3 sequences
EVQLVESGGGLVQPGGSLRLSCAASGFTFSTYAMNWVRQAPGKGLEWVGRIRSKYNNYATAYADSVKGRFTISRDDSKNTLYLQMNSLRAEDTAVYYCVRHGNFGDSYVSWFDYWGQGTLVTVSSGKPGSGKPGSGKPGSGKPGSQAVVTQEPSLTVSPGGTVTLTCGSSTGAVTTSNYANWVQQKPGKSPRGLIGGTNKRAPGVPARFSGSLLGGKAALTISGAQPEDEADYYCALWYSNHWVFGGGTKLTVL

SEQ ID NO: 272 - protein, 125 aa, Artificial Sequence
  anti-CD3 sequences
EVQLVESGGGLVQPGGSLRLSCAASGFTFSTYAMNWVRQAPGKGLEWVGRIRSKYNNYATAYADSVKGRFTISRDDSKNTLYLQMNSLRAEDTAVYYCVRHGNFGDSYVSWFDYWGQGTLVTVSS

SEQ ID NO: 273 - protein, 109 aa, Artificial Sequence; identical to SEQ ID NO: 5
  anti-CD3 sequences

SEQ ID NO: 274 - protein, 262 aa, Artificial Sequence
  anti-CD3 sequences
EVQLVESGGGLVQPGGSLRLSCAASGFTFSTYAMNWVRQAPGKGLEWVGRIRSKYNNYATYYADSVKGRFTISRDDSKNTLYLQMNSLRAEDTAVYYCVRHGNFGASYVSWFDYWGQGTLVTVSSGKPGSGKPGSGKPGSGKPGSQAVVTQEPSLTVSPGGTVTLTCGSSTGAVTTSNYANWVQQKPGKSPRGLIGGTNKRAPGVPARFSGSLLGGKAALTISGAQPEDEADYYCALWYSNHWVFGGGTKLTVLGSHHHHHH

SEQ ID NO: 275 - protein, 254 aa, Artificial Sequence
  anti-CD3 sequences
EVQLVESGGGLVQPGGSLRLSCAASGFTFSTYAMNWVRQAPGKGLEWVGRIRSKYNNYATYYADSVKGRFTISRDDSKNTLYLQMNSLRAEDTAVYYCVRHGNFGASYVSWFDYWGQGTLVTVSSGKPGSGKPGSGKPGSGKPGSQAVVTQEPSLTVSPGGTVTLTCGSSTGAVTTSNYANWVQQKPGKSPRGLIGGTNKRAPGVPARFSGSLLGGKAALTISGAQPEDEADYYCALWYSNHWVFGGGTKLTVL

SEQ ID NO: 276 - protein, 125 aa, Artificial Sequence
  anti-CD3 sequences
EVQLVESGGGLVQPGGSLRLSCAASGFTFSTYAMNWVRQAPGKGLEWVGRIRSKYNNYATYYADSVKGRFTISRDDSKNTLYLQMNSLRAEDTAVYYCVRHGNFGASYVSWFDYWGQGTLVTVSS

SEQ ID NO: 277 - protein, 109 aa, Artificial Sequence; identical to SEQ ID NO: 5
  anti-CD3 sequences

SEQ ID NO: 278 - protein, 262 aa, Artificial Sequence
  anti-CD3 sequences
EVQLVESGGGLVQPGGSLRLSCAASGFTFSTYAMNWVRQAPGKGLEWVGRIRSKYNNYATYYADSVKGRFTISRDDSKNTLYLQMNSLRAEDTAVYYCVRHGNFGQSYVSWFDYWGQGTLVTVSSGKPGSGKPGSGKPGSGKPGSQAVVTQEPSLTVSPGGTVTLTCGSSTGAVTTSNYANWVQQKPGKSPRGLIGGTNKRAPGVPARFSGSLLGGKAALTISGAQPEDEADYYCALWYSNHWVFGGGTKLTVLGSHHHHHH

SEQ ID NO: 279 - protein, 254 aa, Artificial Sequence
  anti-CD3 sequences
EVQLVESGGGLVQPGGSLRLSCAASGFTFSTYAMNWVRQAPGKGLEWVGRIRSKYNNYATYYADSVKGRFTISRDDSKNTLYLQMNSLRAEDTAVYYCVRHGNFGQSYVSWFDYWGQGTLVTVSSGKPGSGKPGSGKPGSGKPGSQAVVTQEPSLTVSPGGTVTLTCGSSTGAVTTSNYANWVQQKPGKSPRGLIGGTNKRAPGVPARFSGSLLGGKAALTISGAQPEDEADYYCALWYSNHWVFGGGTKLTVL

SEQ ID NO: 280 - protein, 125 aa, Artificial Sequence
  anti-CD3 sequences
EVQLVESGGGLVQPGGSLRLSCAASGFTFSTYAMNWVRQAPGKGLEWVGRIRSKYNNYATYYADSVKGRFTISRDDSKNTLYLQMNSLRAEDTAVYYCVRHGNFGQSYVSWFDYWGQGTLVTVSS

SEQ ID NO: 281 - protein, 109 aa, Artificial Sequence; identical to SEQ ID NO: 5
  anti-CD3 sequences

SEQ ID NO: 282 - protein, 262 aa, Artificial Sequence
  anti-CD3 sequences
EVQLVESGGGLVQPGGSLRLSCAASGFTFSTYAMNWVRQAPGKGLEWVGRIRSKYNNYATYYADSVKGRFTISRDDSKNTLYLQMNSLRAEDTAVYYCVRHGNFGDEYVSWFDYWGQGTLVTVSSGKPGSGKPGSGKPGSGKPGSQAVVTQEPSLTVSPGGTVTLTCGSSTGAVTTSNYANWVQQKPGKSPRGLIGGTNKRAPGVPARFSGSLLGGKAALTISGAQPEDEADYYCALWYSNHWVFGGGTKLTVLGSHHHHHH

SEQ ID NO: 283 - protein, 254 aa, Artificial Sequence
  anti-CD3 sequences
EVQLVESGGGLVQPGGSLRLSCAASGFTFSTYAMNWVRQAPGKGLEWVGRIRSKYNNYATYYADSVKGRFTISRDDSKNTLYLQMNSLRAEDTAVYYCVRHGNFGDEYVSWFDYWGQGTLVTVSSGKPGSGKPGSGKPGSGKPGSQAVVTQEPSLTVSPGGTVTLTCGSSTGAVTTSNYANWVQQKPGKSPRGLIGGTNKRAPGVPARFSGSLLGGKAALTISGAQPEDEADYYCALWYSNHWVFGGGTKLTVL

SEQ ID NO: 284 - protein, 125 aa, Artificial Sequence
  anti-CD3 sequences
EVQLVESGGGLVQPGGSLRLSCAASGFTFSTYAMNWVRQAPGKGLEWVGRIRSKYNNYATYYADSVKGRFTISRDDSKNTLYLQMNSLRAEDTAVYYCVRHGNFGDEYVSWFDYWGQGTLVTVSS

SEQ ID NO: 285 - protein, 109 aa, Artificial Sequence; identical to SEQ ID NO: 5
  anti-CD3 sequences

SEQ ID NO: 286 - protein, 262 aa, Artificial Sequence
  anti-CD3 sequences
EVQLVESGGGLVQPGGSLRLSCAASGFTFSTYAMNWVRQAPGKGLEWVGRIRSKYNNYATYYADSVKGRFTISRDDSKNTLYLQMNSLRAEDTAVYYCVRHGNFGDNYVSWFDYWGQGTLVTVSSGKPGSGKPGSGKPGSGKPGSQAVVTQEPSLTVSPGGTVTLTCGSSTGAVTTSNYANWVQQKPGKSPRGLIGGTNKRAPGVPARFSGSLLGGKAALTISGAQPEDEADYYCALWYSNHWVFGGGTKLTVLGSHHHHHH

SEQ ID NO: 287 - protein, 254 aa, Artificial Sequence
  anti-CD3 sequences
EVQLVESGGGLVQPGGSLRLSCAASGFTFSTYAMNWVRQAPGKGLEWVGRIRSKYNNYATYYADSVKGRFTISRDDSKNTLYLQMNSLRAEDTAVYYCVRHGNFGDNYVSWFDYWGQGTLVTVSSGKPGSGKPGSGKPGSGKPGSQAVVTQEPSLTVSPGGTVTLTCGSSTGAVTTSNYANWVQQKPGKSPRGLIGGTNKRAPGVPARFSGSLLGGKAALTISGAQPEDEADYYCALWYSNHWVFGGGTKLTVL

SEQ ID NO: 288 - protein, 125 aa, Artificial Sequence
  anti-CD3 sequences
EVQLVESGGGLVQPGGSLRLSCAASGFTFSTYAMNWVRQAPGKGLEWVGRIRSKYNNYATYYADSVKGRFTISRDDSKNTLYLQMNSLRAEDTAVYYCVRHGNFGDNYVSWFDYWGQGTLVTVSS

SEQ ID NO: 289 - protein, 109 aa, Artificial Sequence; identical to SEQ ID NO: 5
  anti-CD3 sequences

SEQ ID NO: 290 - protein, 262 aa, Artificial Sequence
  anti-CD3 sequences
EVQLVESGGGLVQPGGSLRLSCAASGFTFSTYAMNWVRQAPGKGLEWVGRIRSKYNNYATYYADSVKGRFTISRDDSKNTLYLQMNSLRAEDTAVYYCVRHGNFGDPYVSWFDYWGQGTLVTVSSGKPGSGKPGSGKPGSGKPGSQAVVTQEPSLTVSPGGTVTLTCGSSTGAVTTSNYANWVQQKPGKSPRGLIGGTNKRAPGVPARFSGSLLGGKAALTISGAQPEDEADYYCALWYSNHWVFGGGTKLTVLGSHHHHHH

SEQ ID NO: 291 - protein, 254 aa, Artificial Sequence
  anti-CD3 sequences
EVQLVESGGGLVQPGGSLRLSCAASGFTFSTYAMNWVRQAPGKGLEWVGRIRSKYNNYATYYADSVKGRFTISRDDSKNTLYLQMNSLRAEDTAVYYCVRHGNFGDPYVSWFDYWGQGTLVTVSSGKPGSGKPGSGKPGSGKPGSQAVVTQEPSLTVSPGGTVTLTCGSSTGAVTTSNYANWVQQKPGKSPRGLIGGTNKRAPGVPARFSGSLLGGKAALTISGAQPEDEADYYCALWYSNHWVFGGGTKLTVL

SEQ ID NO: 292 - protein, 125 aa, Artificial Sequence
  anti-CD3 sequences
EVQLVESGGGLVQPGGSLRLSCAASGFTFSTYAMNWVRQAPGKGLEWVGRIRSKYNNYATYYADSVKGRFTISRDDSKNTLYLQMNSLRAEDTAVYYCVRHGNFGDPYVSWFDYWGQGTLVTVSS

SEQ ID NO: 293 - protein, 109 aa, Artificial Sequence; identical to SEQ ID NO: 5
  anti-CD3 sequences

SEQ ID NO: 294 - protein, 262 aa, Artificial Sequence
  anti-CD3 sequences
EVQLVESGGGLVQPGGSLRLSCAASGFTFSTYAMNWVRQAPGKGLEWVGRIRSKYNNYATYYADSVKGRFTISRDDSKNTLYLQMNSLRAEDTAVYYCVRHGNFGDQYVSWFDYWGQGTLVTVSSGKPGSGKPGSGKPGSGKPGSQAVVTQEPSLTVSPGGTVTLTCGSSTGAVTTSNYANWVQQKPGKSPRGLIGGTNKRAPGVPARFSGSLLGGKAALTISGAQPEDEADYYCALWYSNHWVFGGGTKLTVLGSHHHHHH

SEQ ID NO: 295 - protein, 254 aa, Artificial Sequence
  anti-CD3 sequences
EVQLVESGGGLVQPGGSLRLSCAASGFTFSTYAMNWVRQAPGKGLEWVGRIRSKYNNYATYYADSVKGRFTISRDDSKNTLYLQMNSLRAEDTAVYYCVRHGNFGDQYVSWFDYWGQGTLVTVSSGKPGSGKPGSGKPGSGKPGSQAVVTQEPSLTVSPGGTVTLTCGSSTGAVTTSNYANWVQQKPGKSPRGLIGGTNKRAPGVPARFSGSLLGGKAALTISGAQPEDEADYYCALWYSNHWVFGGGTKLTVL

SEQ ID NO: 296 - protein, 125 aa, Artificial Sequence
  anti-CD3 sequences
EVQLVESGGGLVQPGGSLRLSCAASGFTFSTYAMNWVRQAPGKGLEWVGRIRSKYNNYATYYADSVKGRFTISRDDSKNTLYLQMNSLRAEDTAVYYCVRHGNFGDQYVSWFDYWGQGTLVTVSS

SEQ ID NO: 297 - protein, 109 aa, Artificial Sequence; identical to SEQ ID NO: 5
  anti-CD3 sequences

SEQ ID NO: 298 - protein, 262 aa, Artificial Sequence
  anti-CD3 sequences
EVQLVESGGGLVQPGGSLRLSCAASGFTFSTYAMNWVRQAPGKGLEWVGRIRSKANNYATAYADSVKGRFTISRDDSKNTLYLQMNSLRAEDTAVYYCVRHGNFGDSYVSWFAYWGQGTLVTVSSGKPGSGKPGSGKPGSGKPGSQAVVTQEPSLTVSPGGTVTLTCGSSTGAVTTSNYANWVQQKPGKSPRGLIGGTNKRAPGVPARFSGSLLGGKAALTISGAQPEDEADYYCALWYSNHWVFGGGTKLTVLGSHHHHHH

SEQ ID NO: 299 - protein, 254 aa, Artificial Sequence
  anti-CD3 sequences
EVQLVESGGGLVQPGGSLRLSCAASGFTFSTYAMNWVRQAPGKGLEWVGRIRSKANNYATAYADSVKGRFTISRDDSKNTLYLQMNSLRAEDTAVYYCVRHGNFGDSYVSWFAYWGQGTLVTVSSGKPGSGKPGSGKPGSGKPGSQAVVTQEPSLTVSPGGTVTLTCGSSTGAVTTSNYANWVQQKPGKSPRGLIGGTNKRAPGVPARFSGSLLGGKAALTISGAQPEDEADYYCALWYSNHWVFGGGTKLTVL

SEQ ID NO: 300 - protein, 125 aa, Artificial Sequence
  anti-CD3 sequences
EVQLVESGGGLVQPGGSLRLSCAASGFTFSTYAMNWVRQAPGKGLEWVGRIRSKANNYATAYADSVKGRFTISRDDSKNTLYLQMNSLRAEDTAVYYCVRHGNFGDSYVSWFAYWGQGTLVTVSS

SEQ ID NO: 301 - protein, 109 aa, Artificial Sequence; identical to SEQ ID NO: 5
  anti-CD3 sequences

SEQ ID NO: 302 - protein, 262 aa, Artificial Sequence
  anti-CD3 sequences
EVQLVESGGGLVQPGGSLRLSCAASGFTFSTYAMNWVRQAPGKGLEWVGRIRSKANNYATAYADSVKGRFTISRDDSKNTLYLQMNSLRAEDTAVYYCVRHGNFGASYVSWFAYWGQGTLVTVSSGKPGSGKPGSGKPGSGKPGSQAVVTQEPSLTVSPGGTVTLTCGSSTGAVTTSNYANWVQQKPGKSPRGLIGGTNKRAPGVPARFSGSLLGGKAALTISGAQPEDEADYYCALWYSNHWVFGGGTKLTVLGSHHHHHH

SEQ ID NO: 303 - protein, 254 aa, Artificial Sequence
  anti-CD3 sequences
EVQLVESGGGLVQPGGSLRLSCAASGFTFSTYAMNWVRQAPGKGLEWVGRIRSKANNYATAYADSVKGRFTISRDDSKNTLYLQMNSLRAEDTAVYYCVRHGNFGASYVSWFAYWGQGTLVTVSSGKPGSGKPGSGKPGSGKPGSQAVVTQEPSLTVSPGGTVTLTCGSSTGAVTTSNYANWVQQKPGKSPRGLIGGTNKRAPGVPARFSGSLLGGKAALTISGAQPEDEADYYCALWYSNHWVFGGGTKLTVL

SEQ ID NO: 304 - protein, 125 aa, Artificial Sequence
  anti-CD3 sequences
EVQLVESGGGLVQPGGSLRLSCAASGFTFSTYAMNWVRQAPGKGLEWVGRIRSKANNYATAYADSVKGRFTISRDDSKNTLYLQMNSLRAEDTAVYYCVRHGNFGASYVSWFAYWGQGTLVTVSS

SEQ ID NO: 305 - protein, 109 aa, Artificial Sequence; identical to SEQ ID NO: 5
  anti-CD3 sequences

SEQ ID NO: 306 - protein, 262 aa, Artificial Sequence
  anti-CD3 sequences
EVQLVESGGGLVQPGGSLRLSCAASGFTFSTYAMNWVRQAPGKGLEWVGRIRSKANNYATAYADSVKGRFTISRDDSKNTLYLQMNSLRAEDTAVYYCVRHGNFGQSYVSWFAYWGQGTLVTVSSGKPGSGKPGSGKPGSGKPGSQAVVTQEPSLTVSPGGTVTLTCGSSTGAVTTSNYANWVQQKPGKSPRGLIGGTNKRAPGVPARFSGSLLGGKAALTISGAQPEDEADYYCALWYSNHWVFGGGTKLTVLGSHHHHHH

SEQ ID NO: 307 - protein, 254 aa, Artificial Sequence
  anti-CD3 sequences
EVQLVESGGGLVQPGGSLRLSCAASGFTFSTYAMNWVRQAPGKGLEWVGRIRSKANNYATAYADSVKGRFTISRDDSKNTLYLQMNSLRAEDTAVYYCVRHGNFGQSYVSWFAYWGQGTLVTVSSGKPGSGKPGSGKPGSGKPGSQAVVTQEPSLTVSPGGTVTLTCGSSTGAVTTSNYANWVQQKPGKSPRGLIGGTNKRAPGVPARFSGSLLGGKAALTISGAQPEDEADYYCALWYSNHWVFGGGTKLTVL

SEQ ID NO: 308 - protein, 125 aa, Artificial Sequence
  anti-CD3 sequences
EVQLVESGGGLVQPGGSLRLSCAASGFTFSTYAMNWVRQAPGKGLEWVGRIRSKANNYATAYADSVKGRFTISRDDSKNTLYLQMNSLRAEDTAVYYCVRHGNFGQSYVSWFAYWGQGTLVTVSS

SEQ ID NO: 309 - protein, 109 aa, Artificial Sequence; identical to SEQ ID NO: 5
  anti-CD3 sequences

SEQ ID NO: 310 - protein, 262 aa, Artificial Sequence
  anti-CD3 sequences
EVQLVESGGGLVQPGGSLRLSCAASGFTFSTYAMNWVRQAPGKGLEWVGRIRSKANNYATAYADSVKGRFTISRDDSKNTLYLQMNSLRAEDTAVYYCVRHGNFGDSYVSWFDYWGQGTLVTVSSGKPGSGKPGSGKPGSGKPGSQAVVTQEPSLTVSPGGTVTLTCGSSTGAVTTSNYANWVQQKPGKSPRGLIGGTNKRAPGVPARFSGSLLGGKAALTISGAQPEDEADYYCALWYSNHWVFGGGTKLTVLGSHHHHHH

SEQ ID NO: 311 - protein, 254 aa, Artificial Sequence
  anti-CD3 sequences
EVQLVESGGGLVQPGGSLRLSCAASGFTFSTYAMNWVRQAPGKGLEWVGRIRSKANNYATAYADSVKGRFTISRDDSKNTLYLQMNSLRAEDTAVYYCVRHGNFGDSYVSWFDYWGQGTLVTVSSGKPGSGKPGSGKPGSGKPGSQAVVTQEPSLTVSPGGTVTLTCGSSTGAVTTSNYANWVQQKPGKSPRGLIGGTNKRAPGVPARFSGSLLGGKAALTISGAQPEDEADYYCALWYSNHWVFGGGTKLTVL

SEQ ID NO: 312 - protein, 125 aa, Artificial Sequence
  anti-CD3 sequences
EVQLVESGGGLVQPGGSLRLSCAASGFTFSTYAMNWVRQAPGKGLEWVGRIRSKANNYATAYADSVKGRFTISRDDSKNTLYLQMNSLRAEDTAVYYCVRHGNFGDSYVSWFDYWGQGTLVTVSS

SEQ ID NO: 313 - protein, 109 aa, Artificial Sequence; identical to SEQ ID NO: 5
  anti-CD3 sequences

SEQ ID NO: 314 - protein, 445 aa, Artificial Sequence; identical to SEQ ID NO: 82
  anti-CD3 sequences

SEQ ID NO: 315 - protein, 485 aa, Artificial Sequence; identical to SEQ ID NO: 104
  anti-CD3 sequences

SEQ ID NO: 316 - protein, 214 aa, Artificial Sequence; identical to SEQ ID NO: 84
  anti-CD3 sequences

SEQ ID NO: 317 - protein, 445 aa, Artificial Sequence; identical to SEQ ID NO: 85
  anti-CD3 sequences

SEQ ID NO: 318 - protein, 485 aa, Artificial Sequence; identical to SEQ ID NO: 104
  anti-CD3 sequences

SEQ ID NO: 319 - protein, 214 aa, Artificial Sequence; identical to SEQ ID NO: 87
  anti-CD3 sequences

SEQ ID NO: 320 - protein, 445 aa, Artificial Sequence; identical to SEQ ID NO: 85
  anti-CD3 sequences

SEQ ID NO: 321 - protein, 485 aa, Artificial Sequence; identical to SEQ ID NO: 92
  anti-CD3 sequences

SEQ ID NO: 322 - protein, 214 aa, Artificial Sequence; identical to SEQ ID NO: 84
  anti-CD3 sequences

SEQ ID NO: 323 - protein, 445 aa, Artificial Sequence; identical to SEQ ID NO: 85
  anti-CD3 sequences

SEQ ID NO: 324 - protein, 485 aa, Artificial Sequence; identical to SEQ ID NO: 89
  anti-CD3 sequences

SEQ ID NO: 325 - protein, 214 aa, Artificial Sequence; identical to SEQ ID NO: 84
  anti-CD3 sequences

SEQ ID NO: 326 - protein, 445 aa, Artificial Sequence; identical to SEQ ID NO: 85
  anti-CD3 sequences

SEQ ID NO: 327 - protein, 485 aa, Artificial Sequence; identical to SEQ ID NO: 92
  anti-CD3 sequences

SEQ ID NO: 328 - protein, 214 aa, Artificial Sequence; identical to SEQ ID NO: 87
  anti-CD3 sequences

SEQ ID NO: 329 - protein, 445 aa, Artificial Sequence; identical to SEQ ID NO: 85
  anti-CD3 sequences

SEQ ID NO: 330 - protein, 485 aa, Artificial Sequence; identical to SEQ ID NO: 89
  anti-CD3 sequences

SEQ ID NO: 331 - protein, 214 aa, Artificial Sequence; identical to SEQ ID NO: 87
  anti-CD3 sequences

SEQ ID NO: 332 - protein, 5 aa, Artificial Sequence
  useful linkers
GSGGS

SEQ ID NO: 333 - protein, 5 aa, Artificial Sequence
  useful linkers
GGGGS

SEQ ID NO: 334 - protein, 4 aa, Artificial Sequence
  useful linkers
GGGS

SEQ ID NO: 335 - protein, 483 aa, Artificial Sequence
  XmAb18968 (412220) ScFc
QLVESGGGLVQPGGSLRLSCAASGFTFSTYAMNWVRQAPGKGLEWVGRIRSKANNYATYYADSVKGRFTISRDDSKNTLYLQMNSLRAEDTAVYYCVRHGNFGDSYVSWFAYWGQGTLVTVSSGKPGSGKPGSGKPGSGKPGSQAVVTQEPSLTVSPGGTVTLTCGSSTGAVTTSNYANWVQQKPGKSPRGLIGGTNKRAPGVPARFSGSLLGGKAALTISGAQPEDEADYYCALWYSNHWVFGGGTKLTVLEPKSSDKTHTCPPCPAPPVAGPSVFLFPPKPKDTLMISRTPEVTCVVVDVKHEDPEVKFNWYVDGVEVHNAKTKPREEQYNSTYRVVSVLTVLHQDWLNGKEYKCKVSNKALPAPIEKTISKAKGQPREPQVYTLPPSREQMTKNQVKLTCLVKGFYPSDIAVEWESNGQPENNYKTTPPVLDSDGSFFLYSKLTVDKSRWQQGNVFSCSVMHEALHNHYTQKSLSLSPGK

SEQ ID NO: 336 - protein, 214 aa, Artificial Sequence; identical to SEQ ID NO: 84
  XmAb18968 (412220) LC

SEQ ID NO: 337 - protein, 443 aa, Artificial Sequence
  XmAb18968 (412220) HC
QLVESGGGLVQPGGSLRLSCAASGFDFSRSWMNWVRQAPGKGLEWVSEINPDSSTINYATSVKGRFTISRDNSKNTLYLQMNSLRAEDTAVYYCARYGNWFPYWGQGTLVTVSSASTKGPSVFPLAPSSKSTSGGTAALGCLVKDYFPEPVTVSWNSGALTSGVHTFPAVLQSSGLYSLSSVVTVPSSSLGTQTYICNVNHKPSDTKVDKKVEPKSCDKTHTCPPCPAPPVAGPSVFLFPPKPKDTLMISRTPEVTCVVVDVKHEDPEVKFNWYVDGVEVHNAKTKPREEEYNSTYRVVSVLTVLHQDWLNGKEYKCKVSNKALPAPIEKTISKAKGQPREPQVYTLPPSREEMTKNQVSLTCDVSGFYPSDIAVEWESDGQPENNYKTTPPVLDSDGSFFLYSKLTVDKSRWEQGDVFSCSVMHEALHNHYTQKSLSLSPGK

SEQ ID NO: 338 - DNA, 1449 bp, Artificial Sequence
  XmAb18968 (412220) ScFv-Fc
cagctcgtcgagtctggaggtggcctcgtccagccaggcggtagtctgaggctctcatgcgctgccagcggattcacttttagcacatatgcgatgaattgggtcagacaggctccaggcaaagggctggagtgggtgggacggatcagaagtaagtataataattatgccacctattatgctgactccgtgaagggcagattcactatttctagggacgattccaagaacactctctacctgcaaatgaattccctgagggctgaggacaccgcggtctactattgcgtgcggcacggcaacttcggcgactcttacgtgtcttggttcgactattgggggcaagggactctcgtgacagtgagctccggtaagcctggtagcgggaaaccaggcagcggaaagcctggcagcggtaaaccaggctcccaggccgtggttacacaggaaccctccttgactgtgtcacctgggggcacagtcactcttacctgcggcagttccactggggccgtaacaacctctaactatgcgaattgggttcagcagaagccaggtaagagccctagggggttgataggtggaactaataaacgggcccccggggtgccagcccgcttcagtgggagtttgctggggggaaaggccgccctcaccatctcaggggctcaacccgaggatgaggcagactattactgcgccctgtggtactccaatcactgggtcttcggcgggggtacaaagctgactgtgctggagcccaaatctagcgacaaaactcacacatgcccaccgtgcccggcgcctcctgttgctggaccgtcagtcttcctcttccccccaaaacccaaggacaccctcatgatctcccggacccctgaggtcacatgcgtggtggtggacgtgaagcacgaagaccctgaggtcaagttcaactggtacgtggacggcgtggaggtgcataatgccaagacaaagccgcgggaggagcagtacaacagcacgtaccgtgtggtcagcgtcctcaccgtcctgcaccaggactggctgaatggcaaggagtacaagtgcaaggtctccaacaaagccctcccagcccccatcgagaaaaccatctccaaagccaaagggcagccccgagaaccacaggtgtataccctgcccccatcccgggagcagatgaccaagaaccaggtaaagttgacctgcctggtcaaaggcttctatcccagcgacatcgccgtggagtgggagagcaatgggcagccggagaacaactacaagaccacgcctcccgtgctggactccgacggctccttcttcctctatagcaagctcaccgtggacaagagcaggtggcagcaggggaacgtcttctcatgctccgtgatgcatgaggctctgcacaaccactacacgcagaagagcctctccctgtctccgggtaaa

SEQ ID NO: 339 - DNA, 642 bp, Artificial Sequence
  XmAb18968 (412220) LC
gacatcgtgatgacacagagtcccagctctctctcagcgagcgttggcgatagggtgactataacatgcagagcatcccaaaacgtggatacatgggtggcttggtaccaacagaagccaggtcagtctcccaaggccctgatttatagcgcatcctatcgctacagtggtgttcccgacaggtttaccgggtctggcagtggcaccgattttaccctgactatctcttccctgcaacccgaggacttcgcaacatatttctgccagcagtatgattcctaccccctgaccttcggcggaggcaccaaactcgaaattaagcgtacggtggccgcaccatctgtcttcatcttcccgccatctgatgagcagttgaaatctggaactgcctctgttgtgtgcctgctgaataacttctatcccagagaggccaaagtacagtggaaggtggataacgccctccaatcgggtaactcccaggagagtgtcacagagcaggacagcaaggacagcacctacagcctcagcagcaccctgacgctgagcaaagcagactacgagaaacacaaagtctacgcctgcgaagtcacccatcagggcctgagctcgcccgtcacaaagagcttcaacaggggagagtgt

SEQ ID NO: 340 - DNA, 1329 bp, Artificial Sequence
  XmAb18968 (412220) LC
cagttggtggagagcgggggcggcctcgtccagccggggggctcactgaggctctcctgtgcagccagcggattcgacttcagccgatcatggatgaattgggtgagacaggcacctggtaagggccttgagtgggtctctgagattaatccagactctagtaccattaattacgctacttcagtcaagggcaggtttacgatctcaagagacaacagcaagaatacgctgtacctccaaatgaactctcttagggctgaagatactgcagtgtactactgtgcacgatatgggaactggtttccgtattggggccagggcacgttggtgaccgtgtcttccgcaagcactaagggcccatcggtcttccccctggcaccctcctccaagagcacctctgggggcacagcggccctgggctgcctggtcaaggactacttccccgaaccggtgacggtgtcgtggaactcaggcgccctgaccagcggcgtgcacaccttcccggctgtcctacagtcctcaggactctactccctcagcagcgtggtgaccgtgccctccagcagcttgggcacccagacctacatctgcaacgtgaatcacaagcccagcgacaccaaggtggacaagaaagttgagcccaaatcttgtgacaaaactcacacatgcccaccgtgcccggcgcctcctgttgctggaccgtcagtcttcctcttccccccaaaacccaaggacaccctcatgatctcccggacccctgaggtcacatgcgtggtggtggacgtgaagcacgaagaccctgaggtcaagttcaactggtacgtggacggcgtggaggtgcataatgccaagacaaagccgcgggaggaggagtacaacagcacgtaccgtgtggtcagcgtcctcaccgtcctgcaccaggactggctgaatggcaaggagtacaagtgcaaggtctccaacaaagccctcccagcccccatcgagaaaaccatctccaaagccaaagggcagccccgagaaccacaggtgtataccctgcccccatcccgggaggagatgaccaagaaccaggtaagcttgacctgcgacgtcagcggcttctatcccagcgacatcgccgtggagtgggagagcgacgggcagccggagaacaactacaagaccacgcctcccgtgctggactccgacggctccttcttcctctatagcaagctcaccgtggacaagagcaggtgggagcagggggacgtcttctcatgctccgtgatgcatgaggctctgcacaaccactacacgcagaagagcctctccctgtctccgggtaaa

SEQ ID NO: 341 - protein, 504 aa, Artificial Sequence
  XmAb18968 (412220) ScFv-Fc
MGWSCIILFLVATATGVHSEVQLVESGGGLVQPGGSLRLSCAASGFTFSTYAMNWVRQAPGKGLEWVGRIRSKANNYATYYADSVKGRFTISRDDSKNTLYLQMNSLRAEDTAVYYCVRHGNFGDSYVSWFAYWGQGTLVTVSSGKPGSGKPGSGKPGSGKPGSQAVVTQEPSLTVSPGGTVTLTCGSSTGAVTTSNYANWVQQKPGKSPRGLIGGTNKRAPGVPARFSGSLLGGKAALTISGAQPEDEADYYCALWYSNHWVFGGGTKLTVLEPKSSDKTHTCPPCPAPPVAGPSVFLFPPKPKDTLMISRTPEVTCVVVDVKHEDPEVKFNWYVDGVEVHNAKTKPREEQYNSTYRVVSVLTVLHQDWLNGKEYKCKVSNKALPAPIEKTISKAKGQPREPQVYTLPPSREQMTKNQVKLTCLVKGFYPSDIAVEWESNGQPENNYKTTPPVLDSDGSFFLYSKLTVDKSRWQQGNVFSCSVMHEALHNHYTQKSLSLSPGK

SEQ ID NO: 342 - protein, 233 aa, Artificial Sequence
  XmAb18968 (412220) LC
MGWSCIILFLVATATGVHSDIVMTQSPSSLSASVGDRVTITCRASQNVDTWVAWYQQKPGQSPKALIYSASYRYSGVPDRFTGSGSGTDFTLTISSLQPEDFATYFCQQYDSYPLTFGGGTKLEIKRTVAAPSVFIFPPSDEQLKSGTASVVCLLNNFYPREAKVQWKVDNALQSGNSQESVTEQDSKDSTYSLSSTLTLSKADYEKHKVYACEVTHQGLSSPVTKSFNRGEC

SEQ ID NO: 343 - protein, 464 aa, Artificial Sequence
  XmAb18968 (412220) HC
MGWSCIILFLVATATGVHSEVQLVESGGGLVQPGGSLRLSCAASGFDFSRSWMNWVRQAPGKGLEWVSEINPDSSTINYATSVKGRFTISRDNSKNTLYLQMNSLRAEDTAVYYCARYGNWFPYWGQGTLVTVSSASTKGPSVFPLAPSSKSTSGGTAALGCLVKDYFPEPVTVSWNSGALTSGVHTFPAVLQSSGLYSLSSVVTVPSSSLGTQTYICNVNHKPSDTKVDKKVEPKSCDKTHTCPPCPAPPVAGPSVFLFPPKPKDTLMISRTPEVTCVVVDVKHEDPEVKFNWYVDGVEVHNAKTKPREEEYNSTYRVVSVLTVLHQDWLNGKEYKCKVSNKALPAPIEKTISKAKGQPREPQVYTLPPSREEMTKNQVSLTCDVSGFYPSDIAVEWESDGQPENNYKTTPPVLDSDGSFFLYSKLTVDKSRWEQGDVFSCSVMHEALHNHYTQKSLSLSPGK

SEQ ID NO: 344 - DNA, 1512 bp, Artificial Sequence
  XmAb18968 (412220) ScFv-Fc
atgggatggagctgtatcatcctcttcttggtagcaacagctacaggtgtacactccgaagttcagctcgtcgagtctggaggtggcctcgtccagccaggcggtagtctgaggctctcatgcgctgccagcggattcacttttagcacatatgcgatgaattgggtcagacaggctccaggcaaagggctggagtgggtgggacggatcagaagtaagtataataattatgccacctattatgctgactccgtgaagggcagattcactatttctagggacgattccaagaacactctctacctgcaaatgaattccctgagggctgaggacaccgcggtctactattgcgtgcggcacggcaacttcggcgactcttacgtgtcttggttcgactattgggggcaagggactctcgtgacagtgagctccggtaagcctggtagcgggaaaccaggcagcggaaagcctggcagcggtaaaccaggctcccaggccgtggttacacaggaaccctccttgactgtgtcacctgggggcacagtcactcttacctgcggcagttccactggggccgtaacaacctctaactatgcgaattgggttcagcagaagccaggtaagagccctagggggttgataggtggaactaataaacgggcccccggggtgccagcccgcttcagtgggagtttgctggggggaaaggccgccctcaccatctcaggggctcaacccgaggatgaggcagactattactgcgccctgtggtactccaatcactgggtcttcggcgggggtacaaagctgactgtgctggagcccaaatctagcgacaaaactcacacatgcccaccgtgcccggcgcctcctgttgctggaccgtcagtcttcctcttccccccaaaacccaaggacaccctcatgatctcccggacccctgaggtcacatgcgtggtggtggacgtgaagcacgaagaccctgaggtcaagttcaactggtacgtggacggcgtggaggtgcataatgccaagacaaagccgcgggaggagcagtacaacagcacgtaccgtgtggtcagcgtcctcaccgtcctgcaccaggactggctgaatggcaaggagtacaagtgcaaggtctccaacaaagccctcccagcccccatcgagaaaaccatctccaaagccaaagggcagccccgagaaccacaggtgtataccctgcccccatcccgggagcagatgaccaagaaccaggtaaagttgacctgcctggtcaaaggcttctatcccagcgacatcgccgtggagtgggagagcaatgggcagccggagaacaactacaagaccacgcctcccgtgctggactccgacggctccttcttcctctatagcaagctcaccgtggacaagagcaggtggcagcaggggaacgtcttctcatgctccgtgatgcatgaggctctgcacaaccactacacgcagaagagcctctccctgtctccgggtaaa

SEQ ID NO: 345 - DNA, 699 bp, Artificial Sequence
  XmAb18968 (412220) LC
atgggatggagctgtatcatcctcttcttggtagcaacagctacaggtgtccacagcgacatcgtgatgacacagagtcccagctctctctcagcgagcgttggcgatagggtgactataacatgcagagcatcccaaaacgtggatacatgggtggcttggtaccaacagaagccaggtcagtctcccaaggccctgatttatagcgcatcctatcgctacagtggtgttcccgacaggtttaccgggtctggcagtggcaccgattttaccctgactatctcttccctgcaacccgaggacttcgcaacatatttctgccagcagtatgattcctaccccctgaccttcggcggaggcaccaaactcgaaattaagcgtacggtggccgcaccatctgtcttcatcttcccgccatctgatgagcagttgaaatctggaactgcctctgttgtgtgcctgctgaataacttctatcccagagaggccaaagtacagtggaaggtggataacgccctccaatcgggtaactcccaggagagtgtcacagagcaggacagcaaggacagcacctacagcctcagcagcaccctgacgctgagcaaagcagactacgagaaacacaaagtctacgcctgcgaagtcacccatcagggcctgagctcgcccgtcacaaagagcttcaacaggggagagtgt

SEQ ID NO: 346 - DNA, 1392 bp, Artificial Sequence
  XmAb18968 (412220) LC
atgggatggagctgtatcatcctcttcttggtagcaacagctacaggtgtccactccgaggttcagttggtggagagcgggggcggcctcgtccagccggggggctcactgaggctctcctgtgcagccagcggattcgacttcagccgatcatggatgaattgggtgagacaggcacctggtaagggccttgagtgggtctctgagattaatccagactctagtaccattaattacgctacttcagtcaagggcaggtttacgatctcaagagacaacagcaagaatacgctgtacctccaaatgaactctcttagggctgaagatactgcagtgtactactgtgcacgatatgggaactggtttccgtattggggccagggcacgttggtgaccgtgtcttccgcaagcactaagggcccatcggtcttccccctggcaccctcctccaagagcacctctgggggcacagcggccctgggctgcctggtcaaggactacttccccgaaccggtgacggtgtcgtggaactcaggcgccctgaccagcggcgtgcacaccttcccggctgtcctacagtcctcaggactctactccctcagcagcgtggtgaccgtgccctccagcagcttgggcacccagacctacatctgcaacgtgaatcacaagcccagcgacaccaaggtggacaagaaagttgagcccaaatcttgtgacaaaactcacacatgcccaccgtgcccggcgcctcctgttgctggaccgtcagtcttcctcttccccccaaaacccaaggacaccctcatgatctcccggacccctgaggtcacatgcgtggtggtggacgtgaagcacgaagaccctgaggtcaagttcaactggtacgtggacggcgtggaggtgcataatgccaagacaaagccgcgggaggaggagtacaacagcacgtaccgtgtggtcagcgtcctcaccgtcctgcaccaggactggctgaatggcaaggagtacaagtgcaaggtctccaacaaagccctcccagcccccatcgagaaaaccatctccaaagccaaagggcagccccgagaaccacaggtgtataccctgcccccatcccgggaggagatgaccaagaaccaggtaagcttgacctgcgacgtcagcggcttctatcccagcgacatcgccgtggagtgggagagcgacgggcagccggagaacaactacaagaccacgcctcccgtgctggactccgacggctccttcttcctctatagcaagctcaccgtggacaagagcaggtgggagcagggggacgtcttctcatgctccgtgatgcatgaggctctgcacaaccactacacgcagaagagcctctccctgtctccgggtaaa

SEQ ID NO: 347 - protein, 329 aa, Artificial Sequence
  Fab side HC (Bottle opener backbone 1)
ASTKGPSVFPLAPSSKSTSGGTAALGCLVKDYFPEPVTVSWNSGALTSGVHTFPAVLQSSGLYSLSSVVTVPSSSLGTQTYICNVNHKPSDTKVDKKVEPKSCDKTHTCPPCPAPPVAGPSVFLFPPKPKDTLMISRTPEVTCVVVDVKHEDPEVKFNWYVDGVEVHNAKTKPREEEYNSTYRVVSVLTVLHQDWLNGKEYKCKVSNKALPAPIEKTISKAKGQPREPQVYTLPPSREEMTKNQVSLTCDVSGFYPSDIAVEWESDGQPENNYKTTPPVLDSDGSFFLYSKLTVDKSRWEQGDVFSCSVMHEALHNHYTQKSLSLSPGK

SEQ ID NO: 348 - protein, 231 aa, Artificial Sequence
  scFv HC (Bottle opener backbone 1)
EPKSSDKTHTCPPCPAPPVAGPSVFLFPPKPKDTLMISRTPEVTCVVVDVKHEDPEVKFNWYVDGVEVHNAKTKPREEQYNSTYRVVSVLTVLHQDWLNGKEYKCKVSNKALPAPIEKTISKAKGQPREPQVYTLPPSREQMTKNQVKLTCLVKGFYPSDIAVEWESNGQPENNYKTTPPVLDSDGSFFLYSKLTVDKSRWQQGNVFSCSVMHEALHNHYTQKSLSLSPGK

SEQ ID NO: 349 - protein, 107 aa, Artificial Sequence [sequence omitted]

SEQ ID NO: 350 - protein, 231 aa, Artificial Sequence
  scFv HC (Bottle opener backbone 2)
EPKSSDKTHTCPPCPAPPVAGPSVFLFPPKPKDTLMISRTPEVTCVVVDVKHEDPEVKFNWYVDGVEVHNAKTKPREEQYNSTYRVVSVLTVLHQDWLNGKEYKCKVSNKALPAPIEKTISKAKGQPREPQVYTLPPSREEMTKNQVKLTCLVKGFYPSDIAVEWESNGQPENNYKTTPPVLDSDGSFFLYSKLTVDKSRWQQGNVFSCSVMHEALHNHYTQKSLSLSPGK

SEQ ID NO: 351 - protein, 329 aa, Artificial Sequence
  Fab side HC (Bottle opener backbone 3)
ASTKGPSVFPLAPSSKSTSGGTAALGCLVKDYFPEPVTVSWNSGALTSGVHTFPAVLQSSGLYSLSSVVTVPSSSLGTQTYICNVNHKPSDTKVDKKVEPKSCDKTHTCPPCPAPPVAGPSVFLFPPKPKDTLMISRTPEVTCVVVDVKHEDPEVKFNWYVDGVEVHNAKTKPREEEYNSTYRVVSVLTVLHQDWLNGKEYKCKVSNKALPAPIEKTISKAKGQPREPQVYTLPPSREEMTKNQVSLTCEVSGFYPSDIAVEWESDGQPENNYKTTPPVLDSDGSFFLYSKLTVDKSRWEQGDVFSCSVMHEALHNHYTQKSLSLSPGK

SEQ ID NO: 352 - protein, 231 aa, Artificial Sequence; identical to SEQ ID NO: 350
  scFv HC (Bottle opener backbone 3)

SEQ ID NO: 353 - protein, 330 aa, Artificial Sequence
  Fab side HC (Bottle opener backbone 4)
ASTKGPSVFPLAPSSKSTSGGTAALGCLVKDYFPEPVTVSWNSGALTSGVHTFPAVLQSSGLYSLSSVVTVPSSSLGTQTYICNVNHKPSDTKVDKKVEPKSCDKTHTCPPCPAPPVAGPSVFLFPPKPKDTLMISRTPEVTCVVVDVKHEDPEVKFNWYVDGVEVHNAKTKPREEEYNSTYRVVSVLTVLHQDWLNGKEYKCKVSNKALPAPIEKTISKAKGQPREPQVYTLPPSREEMTENEVSLTCLVKSGFYPSDIAVEWESDGQPENNYKTTPPVLDSDGSFFLYSKLEVDKSRWEQGDVFSCSVMHEALHNHYTQKSLSLSPGK

SEQ ID NO: 354 - protein, 231 aa, Artificial Sequence
  scFv HC (Bottle opener backbone 4)
EPKSSDKTHTCPPCPAPPVAGPSVFLFPPKPKDTLMISRTPEVTCVVVDVKHEDPEVKFNWYVDGVEVHNAKTKPREEQYNSTYRVVSVLTVLHQDWLNGKEYKCKVSNKALPAPIEKTISKAKGQPREPQVYTLPPSREEMTKNQVSLTCLVKGFYPSDIAVEWESNGQPENNYKTTPPVLDSKGSFFLYSKLTVDKSRWQQGNVFSCSVMHEALHNHYTQKSLSLSPGK

SEQ ID NO: 355 - protein, 107 aa, Artificial Sequence
  Variable light (vl) domain (H1L1) CD38 arm
DIVMTQSPSSLSASVGDRVTITCRASQNVDTNVAWYQQKPGQSPKALIYSASYRYSGVPDRFTGSGSGTDFTLTISSLQPEDFATYFCQQYDSYPLTFGGGTKLEIK

We claim:

1. A heterodimeric antibody comprising:
a) a first monomer comprising a first Fc domain and an anti-CD3 scFv comprising
(i) a scFv variable light domain comprising vlCDR1 as set forth in SEQ ID NO:15, vlCDR2 as set forth in SEQ ID NO:16, and vlCDR3 as set forth in SEQ ID NO:17, and
(ii) a scFv variable heavy domain comprising vhCDR1 as set forth in SEQ ID NO:11, vhCDR2 as set forth in SEQ ID NO:12, and vhCDR3 as set forth in SEQ ID NO:13, wherein said scFv is covalently attached to the N-terminus of said Fc domain using a domain linker;
b) a second monomer comprising
i) an anti-CD38 heavy variable domain comprising vhCDR1 as set forth in SEQ ID NO:65, vhCDR2 as set forth in SEQ ID NO:66, and vhCDR3 as set forth in SEQ ID NO:67, and
ii) a heavy constant domain comprising a second Fc domain and; and
c) a light chain comprising a variable constant domain and an anti-CD38 variable light domain comprising vlCDR1 as set forth in SEQ ID NO:69, vlCDR2 as set forth in SEQ ID NO:70, and vlCDR3 as set forth in SEQ ID NO:71.

2. The heterodimeric antibody of claim 1, wherein the anti-CD3 scFv comprises an amino acid sequence at least 90% identical to the amino acid sequence set forth in SEQ ID NO: 18.

3. The heterodimeric antibody of claim 1, wherein the anti-CD3 scFv comprises the amino acid sequence set forth in SEQ ID NO: 18.

4. The heterodimeric antibody of any one of claims 1-3, the anti-CD38 variable light domain comprises an amino acid sequence at least 90% identical to the amino acid sequence set forth in SEQ ID NO:68.

5. The heterodimeric antibody of claim 4, the anti-CD38 variable light domain comprises the amino acid sequence set forth in SEQ ID NO:68.

6. The heterodimeric antibody of any one of claims 1-5, wherein the anti-CD38 heavy variable domain comprises an amino acid sequence at least 90% identical to the amino acid sequence set forth in SEQ ID NO:64.

7. The heterodimeric antibody of claim 6, wherein the anti-CD38 heavy variable domain comprises the amino acid sequence set forth in SEQ ID NO:64.

8. The heterodimeric antibody of any one of claims 1-7, wherein the first monomer comprises an amino acid sequence at least 90% identical to the amino acid sequence set forth in SEQ ID NO:335.

9. The heterodimeric antibody of claim 8, wherein the first monomer comprises the amino acid sequence set forth in SEQ ID NO:335.

10. The heterodimeric antibody of any one of claims 1-9, wherein the second monomer comprises an amino acid sequence at least 90% identical to the amino acid sequence set forth in SEQ ID NO:82.

11. The heterodimeric antibody of claim 10, wherein the second monomer comprises the amino acid sequence set forth in SEQ ID NO:82.

12. The heterodimeric antibody of any one of claims 1-11, wherein the light chain comprises an amino acid sequence at least 90% identical to the amino acid sequence set forth in SEQ ID NO:84.

13. The heterodimeric antibody of claim 12, wherein the light chain comprises the amino acid sequence set forth in SEQ ID NO:84.

14. The heterodimeric antibody of any one of claims 1-13, demonstrating a binding affinity for CD3ε that is less than XmAb13551 and greater than XmAb14702.

15. A heterodimeric antibody comprising:
a) a first monomer comprising a first Fc domain and an anti-CD3 scFv comprising
(i) a scFv variable light domain comprising vlCDR1 as set forth in SEQ ID NO:15, vlCDR2 as set forth in SEQ ID NO:16, and vlCDR3 as set forth in SEQ ID NO:17, and
(ii) a scFv variable heavy domain comprising vhCDR1 as set forth in SEQ ID NO:11, vhCDR2 as set forth in SEQ ID NO:12, and vhCDR3 as set forth in SEQ ID NO:13, wherein said scFv is covalently attached to the N-terminus of said Fc domain using a domain linker;
b) a second monomer comprising
i) an anti-CD38 heavy variable domain comprising vhCDR1 as set forth in SEQ ID NO:73, vhCDR2 as set forth in SEQ ID NO:74, and vhCDR3 as set forth in SEQ ID NO:75, and
ii) a heavy constant domain comprising a second Fc domain and; and
c) a light chain comprising a variable constant domain and an anti-CD38 variable light domain comprising vlCDR1 as set forth in SEQ ID NO:78, vlCDR2 as set forth in SEQ ID NO:79, and vlCDR3 as set forth in SEQ ID NO:80.

16. The heterodimeric antibody of claim 15, wherein the anti-CD3 scFv comprises an amino acid sequence at least 90% identical to the amino acid sequence set forth in SEQ ID NO: 18.

17. The heterodimeric antibody of claim 15, wherein the anti-CD3 scFv comprises the amino acid sequence set forth in SEQ ID NO: 18.

18. The heterodimeric antibody of any one of claims 15-17, the anti-CD38 variable light domain comprises an amino acid sequence at least 90% identical to the amino acid sequence set forth in SEQ ID NO:355.

19. The heterodimeric antibody of claim 18, the anti-CD38 variable light domain comprises the amino acid sequence set forth in SEQ ID NO:355.

20. The heterodimeric antibody of any one of claims 15-19, wherein the anti-CD38 heavy variable domain comprises an amino acid sequence at least 90% identical to the amino acid sequence set forth in SEQ ID NO:73.

21. The heterodimeric antibody of claim 20, wherein the anti-CD38 heavy variable domain comprises the amino acid sequence set forth in SEQ ID NO:73.

22. The heterodimeric antibody of any one of claims 15-21, wherein the first monomer comprises an amino acid sequence at least 90% identical to the amino acid sequence set forth in SEQ ID NO:107.

23. The heterodimeric antibody of claim 22, wherein the first monomer comprises the amino acid sequence set forth in SEQ ID NO:107.

24. The heterodimeric antibody of any one of claims 15-23, wherein the second monomer comprises an amino acid sequence at least 90% identical to the amino acid sequence set forth in SEQ ID NO: 106.

25. The heterodimeric antibody of claim 24, wherein the second monomer comprises the amino acid sequence set forth in SEQ ID NO: 106.

26. The heterodimeric antibody of any one of claims 15-25, wherein the light chain comprises an amino acid sequence at least 90% identical to the amino acid sequence set forth in SEQ ID NO:108.

27. The heterodimeric antibody of claim 26, wherein the light chain comprises the amino acid sequence set forth in SEQ ID NO:108.

28. A heterodimeric antibody comprising:
a) a first monomer comprising a first Fc domain and an anti-CD3 scFv comprising
(i) a scFv variable light domain comprising vlCDR1 as set forth in SEQ ID NO:42, vlCDR2 as set forth in SEQ ID NO:43, and vlCDR3 as set forth in SEQ ID NO:44, and
(ii) a scFv variable heavy domain comprising vhCDR1 as set forth in SEQ ID NO:38, vhCDR2 as set forth in SEQ ID NO:39, and vhCDR3 as set forth in SEQ ID NO:40, wherein said scFv is covalently attached to the N-terminus of said Fc domain using a domain linker;
b) a second monomer comprising
i) an anti-CD38 heavy variable domain comprising vhCDR1 as set forth in SEQ ID NO:65, vhCDR2 as set forth in SEQ ID NO:66, and vhCDR3 as set forth in SEQ ID NO:67, and
ii) a heavy constant domain comprising a second Fc domain and; and
c) a light chain comprising a variable constant domain and an anti-CD38 variable light domain comprising vlCDR1 as set forth in SEQ ID NO:69, vlCDR2 as set forth in SEQ ID NO:70, and vlCDR3 as set forth in SEQ ID NO:71.

29. The heterodimeric antibody of claim 28, wherein the anti-CD3 scFv comprises an amino acid sequence at least 90% identical to the amino acid sequence set forth in SEQ ID NO: 45.

30. The heterodimeric antibody of claim 28, wherein the anti-CD3 scFv comprises the amino acid sequence set forth in SEQ ID NO: 45.

31. The heterodimeric antibody of any one of claims 28-30, the anti-CD38 variable light domain comprises an amino acid sequence at least 90% identical to the amino acid sequence set forth in SEQ ID NO:68.

32. The heterodimeric antibody of claim 31, the anti-CD38 variable light domain comprises the amino acid sequence set forth in SEQ ID NO:68.

33. The heterodimeric antibody of any one of claims 28-32, wherein the anti-CD38 heavy variable domain comprises an amino acid sequence at least 90% identical to the amino acid sequence set forth in SEQ ID NO:64.

34. The heterodimeric antibody of claim 33, wherein the anti-CD38 heavy variable domain comprises the amino acid sequence set forth in SEQ ID NO:64.

35. The heterodimeric antibody of any one of claims 28-34, wherein the first monomer comprises an amino acid sequence at least 90% identical to the amino acid sequence set forth in SEQ ID NO:110.

36. The heterodimeric antibody of claim 35, wherein the first monomer comprises the amino acid sequence set forth in SEQ ID NO:110.

37. The heterodimeric antibody of any one of claims 28-36, wherein the second monomer comprises an amino acid sequence at least 90% identical to the amino acid sequence set forth in SEQ ID NO:109.

38. The heterodimeric antibody of claim 37, wherein the second monomer comprises the amino acid sequence set forth in SEQ ID NO:109.

39. The heterodimeric antibody of any one of claims 28-38, wherein the light chain comprises an amino acid sequence at least 90% identical to the amino acid sequence set forth in SEQ ID NO:111.

40. The heterodimeric antibody of claim 39, wherein the light chain comprises the amino acid sequence set forth in SEQ ID NO:111.

41. The heterodimeric antibody of any one of claims 1-7, 15-21, and 28-34, wherein the first Fc domain and the second Fc domain comprises one or more mutations that reduce homodimerization.

42. A heterodimeric antibody according to any one of claims 1-7, 15-21, and 28-34, wherein said first Fc domain and said second Fc domain comprise a set of variants selected from the group consisting of S364K/E357Q: L368D/K370S; L368D/K370S: S364K; L368E/K370S: S364K; T411T/E360E/Q362E: D401K; L368D/K370S: S364K/E357L and K370S: S364K/E357Q.

43. A heterodimeric antibody according to any one of claims 1-7, 15-21, 28-34, and 42, wherein said scFv domain linker is a charged linker.

44. A heterodimeric antibody according to any one of claims 1-7, 15-21, 28-34, 42, and 43, wherein said heavy chain constant domain comprises the amino acid substitutions N208D/Q295E/N384D/Q418E/N421D.

45. A heterodimeric antibody according to any of one of claims 1-7, 15-21, 28-34, and 42-44, wherein said first and second Fc domains comprise the amino acid substitutions E233P/L234V/L235A/G236del/S267K.

46. A nucleic acid composition encoding the heterodimeric antibody of any one of claims 1-45, said composition comprising:
a) a first nucleic acid encoding said first monomer;
b) a second nucleic acid encoding said second monomer; and
c) a third nucleic acid encoding said light chain.

47. An expression vector composition encoding the heterodimeric antibody of any one of claims 1-45 comprising:
a) a first expression vector comprising a nucleic acid encoding said first monomer;
b) a second expression vector comprising a nucleic acid encoding said second monomer; and
c) a third expression vector comprising a nucleic acid encoding said light chain.

48. A host cell comprising the nucleic acid composition of claim 48.

49. A host cell comprising the expression vector composition of claim 47.

50. A method of making a heterodimeric antibody according to any one of claims 1-45, comprising culturing the host cell of claim 48 or 49 under conditions wherein said antibody is expressed, and recovering said antibody.

51. A pharmaceutical composition comprising the heterodimeric antibody of any one of claims 1-45 and a pharmaceutically acceptable carrier, excipient, or stabilizer.

52. A method of treating a hematopoeitic malignancy, the method comprising administering the heterodimeric antibody of any one of claims 1-45 to a subject in need thereof.

53. The method of claim 52, wherein the hematopoetic malignancy is selected from the group consisting of non-Hodgkin's lymphoma (NHL), Burkitt's lymphoma (BL), multiple myeloma (MM), B chronic lymphocytic leukemia (B-CLL), B and T acute lymphocytic leukemia (ALL), T cell lymphoma (TCL), acute myeloid leukemia (AML), hairy cell leukemia (HCL), Hodgkin's Lymphoma (HL), chronic lymphocytic leukemia (CLL) and chronic myeloid leukemia (CML).

54. The method of claim 52 or claim 53, wherein the method further comprises administering one or more additional therapeutic agents.
